(19) United States
(12) Patent Application Publication
(10) Pub. No.: US 2008/0293136 A1
(43) Pub. Date: Nov. 27, 2008

(54) NUCLEIC ACID COMPOUNDS FOR INHIBITING AKT GENE EXPRESSION AND USES THEREOF

(75) Inventors: Steven C. Quay, Woodinville, WA (US); James McSwiggen, Bothell, WA (US); Narendra K. Vaish, Kirkland, WA (US); Mohammad Ahmadian, Bothell, WA (US)

Correspondence Address: NASTECH PHARMACEUTICAL COMPANY INC;MDRNA, Inc., 3830 MONTE VILLA PARKWAY, BOTHELL, WA, 98021-7266, US

(73) Assignee: NASTECH PHARMACEUTICAL COMPANY INC., Bothell, WA (US)

(21) Appl. No.: 12/039,662

(22) Filed: Feb. 28, 2008

Related U.S. Application Data
(60) Provisional application No. 60/934,940, filed on Mar. 2, 2007.
(60) Provisional application No. 60/934,930, filed on Mar. 16, 2007.
(60) Provisional application No. 60/973,398, filed on Sep. 18, 2007.
(60) Provisional application No. 61/013,212, filed on Dec. 12, 2007.
(60) Provisional application No. 61/013,239, filed on Dec. 12, 2007.

(51) Int. Cl. C12N 5/06; C07H 21/04

(52) U.S. Cl. 435/375; 536/23.1

(57) ABSTRACT

The present disclosure provides meroduplex ribonucleic acid molecules (mdRNA) capable of decreasing or silencing AKT gene expression. An mdRNA of this disclosure comprises at least three strands that combine to form at least two non-overlapping double-stranded regions separated by a nick or gap wherein one strand is complementary to an AKT mRNA. In addition, the meroduplex may have at least one uridine substituted with a 5-methyluridine, a nucleoside replaced with a locked nucleic acid, or optionally other modifications, and any combination thereof. Also provided are methods of decreasing expression of an AKT gene in a cell or in a subject to treat an AKT-related disease.

### CROSS-REFERENCE TO RELATED APPLICATIONS

[0001] The present application claims priority to U.S. patent application Nos. 60/934,940, filed Mar. 2, 2007; 60/934,930, filed Mar. 16, 2007; 60/973,398, filed Sep. 18, 2007; 61/013,212, filed Dec. 12, 2007; and 61/013,239, filed Dec. 12, 2007, each of which is incorporated by reference in its entirety.

### TECHNICAL FIELD

[0002] The present disclosure relates generally to compounds for use in treating hyperproliferative or inflammatory disorders by gene silencing and, more specifically, to a nicked or gapped double-stranded RNA (dsRNA) comprising at least three strands that decreases expression of a v-AKT murine thymoma viral oncogene (AKT) gene, and to uses of such dsRNA to treat or prevent one or more hyperproliferative disorders, including lymphomas, melanomas, prostate cancer, breast cancer, prostate cancer, ovarian cancer, pancreatic cancer, thyroid cancer, and colorectal cancer; cancer metastasis; and one or more inflammatory disorders, including diabetes, and schizophrenia associated with inappropriate AKT gene expression. The dsRNA that decreases AKT gene expression may optionally have at least one uridine substituted with a 5-methyluridine.

### BACKGROUND

[0003] RNA interference (RNAi) refers to the cellular process of sequence specific, post-transcriptional gene silencing in animals mediated by small inhibitory nucleic acid molecules, such as a double-stranded RNA (dsRNA) that is homologous to a portion of a targeted messenger RNA (Fire et al., Nature 391:806, 1998; Hamilton et al., Science 286:950, 1999). RNAi has been observed in a variety of organisms, including mammalians (Fire et al., Nature 391:806, 1998; Bahramian and Zarbl, Mol. Cell Biol. 19:274, 1999; Wianny and Goetz, Nature Cell Biol. 2:70, 1999). RNAi can be induced by introducing an exogenous 21-nucleotide RNA duplex into cultured mammalian cells (Elbashir et al., Nature 411:494, 2001a).

[0004] The mechanism by which dsRNA mediates targeted gene-silencing can be described as involving two steps. The first step involves degradation of long dsRNAs by a ribonuclease III-like enzyme, referred to as Dicer, into short interfering RNAs (siRNAs) having from 21 to 23 nucleotides with double-stranded regions of about 19 base pairs and a two nucleotide, generally, overhang at each 3′-end (Berstein et al., Nature 409:363, 2001; Elbashir et al., Genes Dev. 15:188, 2001b; and Kim et al., Nature Biotech. 23:222, 2005). The second step of RNAi gene-silencing involves activation of a multi-component nuclease having one strand (guide or antisense strand) from the siRNA and an Argonaute protein to form an RNA-induced silencing complex (“RISC”) (Elbashir et al., Genes Dev. 15:188, 2001). Argonaute initially associates with a double-stranded siRNA and then endonucleolytically cleaves the non-incorporated strand (passenger or sense strand) to facilitate its release due to resulting thermodynamic instability of the cleaved duplex (Leuschner et al., EMBO 7:314, 2006). The guide strand is now able to bind a complementary target mRNA and the activated RISC cleaves the mRNA to promote gene silencing. Cleavage of the target RNA occurs in the middle of the target region that is complementary to the guide strand (Elbashir et al., 2001b).

[0005] Signaling proteins encoded by members of the v-AKT murine thymoma viral oncogene (AKT) family (known collectively as protein kinase B (PKB)) are involved in the regulation of metabolism, cell survival/apoptosis, motility, transcription, and cell-cycle progression (reviewed in Fayard et al., J. Cell Science 118:5675, 2005). The AKT subfamily comprises three mammalian isoforms, AKT1, AKT2, and AKT3 (PKBα, PKBβ, and PKBγ, respectively), which are products of distinct genes and share a conserved structure that includes three functional domains: an N-terminal pleckstrin homology (PH) domain, a central kinase domain, and a C-terminal regulatory domain containing the hydrophobic motif (HM) phosphorylation site (Hanada et al., Biochim. Biophys. Acta. 1697:3, 2004). Recent work on knockout mice indicates that isoform-specific functions, as well as some functional redundancy, occurs between AKT1, AKT2, and AKT3 (Yang et al., Biochem. Soc. Trans. 32:350, 2004). Overexpression of active AKT leads to cardiac or skeletal muscle hypertrophy, an increase in β-cell mass and size, and potentially the progression of tumors, such as T cell lymphomas or prostate intraepithelial neoplasia (Lai et al., Col. Cell. Biol. 24:9295, 2004; Yang et al., Biochem. Soc. Trans. 32:350, 2004). Several laboratories have reported increased AKT activity, phosphorylation, and protein expression in tumors of the breast, prostate, ovary, and pancreas (see, e.g., Altomare and Testa, Oncogene 24:7455, 2005).

[0006] AKT1 is an important cell survival protein that is functionally involved in antiapoptosis in various cancers (Vivanco and Sawyers, Nat. Rev. Cancer 2:489, 2002; Datta et al., Genes Dev. 13:2905, 1999). The antiapoptotic role of AKT1 accounts for its transforming potential and for the resistance of cancer cells to the action of chemotherapeutic agents and ionizing radiation (Simpson and Parsons, Exp. Cell. Res. 264:29, 2001). A variety of inhibitors of AKT1 have been described including, for example, lipid-based inhibitors, small molecules, and rationally designed peptides (see, e.g., West et al., Drug Resist. Update 5:234, 2002; Granville et al., Clin. Cancer Res. 12:679, 2006).

[0007] Overexpression of AKT2 has been shown to lead to increased cell invasiveness and metastasis both in vitro and in vivo (Arboleda et al., Cancer Res. 63, 2003). AKT2 is amplified and overexpressed in some human ovarian carcinoma cell lines and primary tumors, indicating that AKT2 contributes to the pathogenesis of common epithelial tumors of the ovary (Cheng et al. Proc. Nat'l Acad. Sci. USA 89, 1992). AKT2 has been shown to contribute to the malignant phenotype of a subset of human ductal pancreatic cancers (Cheng et al., Proc. Nat'l Acad. Sci. USA 93, 1996). It has been shown that expression of AKT2 is increased in the glandular components of human colorectal cancers of all stages, as compared with polyps and normal mucosa (Rychahou et al., Ann. Surg. 243:6, 2006). AKT2 mRNA and protein levels have both been shown to be increased in differentiated thyroid cancer (particularly follicular thyroid cancer) compared with normal thyroid tissue, suggesting that AKT2 may be important in the pathogenesis or progression of thyroid cancer (Ringel et al., Cancer Res. 61, 2001). Amplification and overexpression of AKT2 has been detected in some steroid hormone-insensitive breast cancers (Arboleda et al., 2003; Rychahou et al., 2006). A variety of inhibitors of AKT2 have been described including, lipid-based inhibitors, small molecules, and rationally designed peptides (see, e.g., Hideshima et al., Blood 107:10, 2006; Castillo et al., Cancer Res. 64, 2004; Yang et al., Cancer Res. 64, 2004; Barnett et al., Biochem J. 385, 2005; Amaravadi et al., J. Clin. Invest. 115:10, 2005; Jiang et al., Mol. Cell. Biol. 20:1, 2000; Zhao et al., Bioorg. Med. Chem. Lett. 15, 2005; Jin et al., Br. J. Cancer 91, 2004; Hiromura et al., J. Biol. Chem. 279:51, 2004; Shin et al., Cancer Res. 65:7, 2005).

[0008] Increased activity of AKT3 has been shown in melanoma tumors, correlating with tumor progression and providing cells with a selective advantage in the tumor environment (Stahl et al., Cancer Res. 64, 2004). Selective up-regulation of AKT3 RNA expression has been reported in hormone-independent breast and prostate cancer cell lines, indicating that increased AKT3 expression may be associated with breast or prostate tumor progression (Zinda at al., Clin. Cancer Res. 7, 2001; Nakatani et al., J. Biol. Chem. 274:31, 1999). It has been shown that AKT3 protein is expressed in thyroid cancer cells and may play a role in the pathogenesis or progression of sporadic thyroid cancer (Ringel et al., Cancer Res. 61, 2001). AKT3 has been implicated as a key mediator of ovarian oncogenesis (Cristiano et al., Cancer Res. 66:24, 2006). A variety of inhibitors of AKT3 have been described including, for example, lipid-based inhibitors, small molecules, and rationally designed peptides (see, e.g., Hideshima et al., Blood 107:10, 2006; Castillo et al., Cancer Res. 64, 2004; Yang et al., Cancer Res. 64, 2004; Amaravadi et al, J. Clin. Invest. 115:10, 2005; Jin et al., Br. J. Cancer 91, 2004; Masure et al., Eur. J. Biochem. 265, 1999; Hiromura et al., J. Biol. Chem. 279:51, 2004; Shin et al., Cancer Res. 65:7, 2005).

[0009] There continues to be a need for alternative effective therapeutic modalities useful for treating or preventing AKT-associated diseases or disorders in which reduced AKT gene expression (gene silencing) would be beneficial. The present disclosure meets such needs, and further provides other related advantages.

### BRIEF SUMMARY

[0010] Briefly, the present disclosure provides nicked or gapped double-stranded RNA (dsRNA) comprising at least three strands that is suitable as a substrate for Dicer or as a RISC activator to modify expression of a v-AKT murine thymoma viral oncogene (AKT) messenger RNA (mRNA).

[0011] In one aspect, the instant disclosure provides a meroduplex mdRNA molecule, comprising a first strand that is complementary to any one of human AKT1 mRNA as set forth in SEQ ID NO:1158, 1159, or 1160, human AKT2 mRNA as set forth in SEQ ID NO:1972, or human AKT3 mRNA as set forth in SEQ ID NO:2483 or 2484, and a second strand and a third strand that are each complementary to non-overlapping regions of the first strand, wherein the second strand and third strands can anneal with the first strand to form at least two double-stranded regions spaced apart by up to 10 nucleotides and thereby forming a gap between the second and third strands, and wherein (a) the mdRNA molecule optionally includes at least one double-stranded region comprising from 5 base pairs to 13 base pairs, or (b) the double-stranded regions combined total about 15 base pairs to about 40 base pairs and the mdRNA molecule optionally has blunt ends. In certain embodiments, the first strand is about 15 to about 40 nucleotides in length, and the second and third strands are each, individually, about 5 to about 20 nucleotides, wherein the combined length of the second and third strands is about 15 nucleotides to about 40 nucleotides. In other embodiments, the first strand is about 15 to about 40 nucleotides in length and is complementary to at least about 15, 16, 17, 18, 19, 20, 21, 22, 23, 24, 25, 26, 27, 28, 29, 30, 31, 32, 33, 34, 35, 36, 37, 38, 39, or 40 contiguous nucleotides of any one of human AKT1 mRNA as set forth in SEQ ID NO:1158, 1159, or 1160, human AKT2 mRNA as set forth in SEQ ID NO:1972, or human AKT3 mRNA as set forth in SEQ ID NO:2483 or 2484. In still further embodiments, the first strand is about 15 to about 40 nucleotides in length and is at least about 70%, 75%, 80%, 85%, 90%, 91%, 92%, 93%, 94%, 95%, 96%, 97%, 98%, or 99% identical to a sequence that is complementary to at least about 15, 16, 17, 18, 19, 20, 21, 22, 23, 24, 25, 26, 27, 28, 29, 30, 31, 32, 33, 34, 35, 36, 37, 38, 39, or 40 contiguous nucleotides of any one of human AKT1 mRNA as set forth in SEQ ID NO:1158, 1159, or 1160, human AKT2 mRNA as set forth in SEQ ID NO:1972, or human AKT3 mRNA as set forth in SEQ ID NO:2483 or 2484.

[0012] In other embodiments, the mdRNA is a RISC activator (e.g., the first strand has about 15 nucleotides to about 25 nucleotides) or a Dicer substrate (e.g., the first strand has about 26 nucleotides to about 40 nucleotides). In some embodiments, the gap comprises at least one to ten unpaired nucleotides in the first strand positioned between the double-stranded regions formed by the second and third strands when annealed to the first strand, or the gap is a nick. In certain embodiments, the nick or gap is located 10 nucleotides from the 5′-end of the first (antisense) strand or at the Argonaute cleavage site. In another embodiment, the meroduplex nick or gap is positioned such that the thermal stability is maximized for the first and second strand duplex and for the first and third strand duplex as compared to the thermal stability of such meroduplexes having a nick or gap in a different position.

[0013] In another aspect, the instant disclosure provides an mdRNA molecule having a first strand that is complementary to any one of human AKT1 mRNA as set forth in SEQ ID NO:1158, 1159, or 1160, human AKT2 mRNA as set forth in SEQ ID NO:1972, or human AKT3 mRNA as set forth in SEQ ID NO:2483 or 2484, and a second strand and a third strand that is each complementary to non-overlapping regions of the first strand, wherein the second strand and third strand can anneal with the first strand to form at least two double-stranded regions spaced apart by up to 10 nucleotides and thereby forming a gap between the second and third strands, and wherein (a) the mdRNA molecule optionally includes at least one double-stranded region comprising from 5 base pairs to 13 base pairs, or (b) the double-stranded regions combined total about 15 base pairs to about 40 base pairs and the mdRNA molecule optionally has blunt ends; and wherein at least one pyrimidine of the mdRNA comprises a pyrimidine nucleoside according to Formula I or II:

[chemical structure]

wherein R¹ and R² are each independently a —H, —OH, —OCH₃, —OCH₂OCH₂CH₃, —OCH₂CH₂OCH₃, halogen, substituted or unsubstituted C₁-C₁₀ alkyl, alkoxy, alkoxyalkyl, hydroxyalkyl, carboxyalkyl, alkylsulfonylamino, aminoalkyl, dialkylamino, alkylaminoalkyl, dialkylaminoalkyl, haloalkyl, trifluoromethyl, cycloalkyl, (cycloalkyl)alkyl, substituted or unsubstituted C₂-C₁₀ alkenyl, substituted or unsubstituted —O-allyl, —O—CH₂CH═CH₂, —O—CH═CHCH₃, substituted or unsubstituted C₂-C₁₀ alkynyl, carbamoyl, carbamyl, carboxy, carbonylamino, substituted or unsubstituted aryl, substituted or unsubstituted aralkyl, —NH₂, —NO₂, —C≡N, or heterocyclo group; R³ and R⁴ are each independently a hydroxyl, a protected hydroxyl, a phosphate, or an internucleoside linking group; and R⁵ and R⁸ are independently O or S. In certain embodiments, at least one nucleoside is according to Formula I in which R¹ is methyl and R² is —OH. In certain related embodiments, at least one uridine of the dsRNA molecule is replaced with a nucleoside according to Formula I in which R¹ is methyl and R² is —OH, or R¹ is methyl, R² is —OH, and R⁸ is S. In some embodiments, the at least one R¹ is a C₁-C₅ alkyl, such as methyl. In some embodiments, at least one R² is selected from 2′-O—(C₁-C₅)alkyl, 2′-O-methyl, 2′-OCH₂OCH₂CH₃, 2′-OCH₂CH₂OCH₃, 2′-O-allyl, or fluoro. In some embodiments, at least one pyrimidine nucleoside of the mdRNA molecule is a locked nucleic acid (LNA) in the form of a bicyclic sugar, wherein R² is oxygen, and the 2′-O and 4′-C form an oxymethylene bridge on the same ribose ring (e.g., a 5-methyluridine LNA) or is a G clamp. In other embodiments, one or more of the nucleosides are according to Formula I in which R¹ is methyl and R² is a 2′-O—(C₁-C₅)alkyl, such as 2′-O-methyl. In some embodiments, the gap comprises at least one unpaired nucleotide in the first strand positioned between the double-stranded regions formed by the second and third strands when annealed to the first strand, or the gap is a nick. In certain embodiments, the nick or gap is located 10 nucleotides from the 5′-end of the first strand or at the Argonaute cleavage site. In another embodiment, the meroduplex nick or gap is positioned such that the thermal stability is maximized for the first and second strand duplex and for the first and third strand duplex as compared to the thermal stability of such meroduplexes having a nick or gap in a different position.

[0014] In still another aspect, the instant disclosure provides a method for reducing the expression of a human AKT gene in a cell, comprising administering an mdRNA molecule to a cell expressing an AKT gene, wherein the mdRNA molecule is capable of specifically binding to an AKT mRNA and thereby reducing the gene's level of expression in the cell. In a related aspect, there is provided a method of treating or preventing a disease associated with AKT expression in a subject by administering an mdRNA molecule of this disclosure. In certain embodiments, the cell or subject is human. In certain embodiments, the disease is one or more hyperproliferative disorders, including lymphomas, melanomas, prostate cancer, breast cancer, prostate cancer, ovarian cancer, pancreatic cancer, thyroid cancer, and colorectal cancer; cancer metastasis; and one or more inflammatory disorders, including diabetes, and schizophrenia.

[0015] In any of the aspects of this disclosure, some embodiments provide an mdRNA molecule having a 5-methyluridine (ribothymidine), a 2-thioribothymidine, or 2′-O-methyl-5-methyluridine in place of at least one uridine on the first, second, or third strand, or in place of each and every uridine on the first, second, or third strand. In further embodiments, the mdRNA further comprises one or more non-standard nucleoside, such as a deoxyuridine, locked nucleic acid (LNA) molecule, or a universal-binding nucleotide, or a G clamp. Exemplary universal-binding nucleotides include C-phenyl, C-naphthyl, inosine, azole carboxamide, 1-β-D-ribofuranosyl-4-nitroindole, 1-β-D-ribofuranosyl-5-nitroindole, 1-β-D-ribofuranosyl-6-nitroindole, or 1-β-D-ribofuranosyl-3-nitropyrrole. In some embodiments, the mdRNA molecule further comprises a 2′-sugar substitution, such as a 2′-O-methyl, 2′-O-methoxyethyl, 2′-O-2-methoxyethyl, 2′-O-allyl, or halogen (e.g., 2′-fluoro). In certain embodiments, the mdRNA molecule further comprises a terminal cap substituent on one or both ends of one or more of the first strand, second strand, or third strand, such as independently an alkyl, abasic, deoxy abasic, glyceryl, dinucleotide, acyclic nucleotide, or inverted deoxynucleotide moiety. In other embodiments, the mdRNA molecule further comprises at least one modified internucleoside linkage, such as independently a phosphorothioate, chiral phosphorothioate, phosphorodithioate, phosphotriester, aminoalkylphosphotriester, methyl phosphonate, alkyl phosphonate, 3′-alkylene phosphonate, 5′-alkylene phosphonate, chiral phosphonate, phosphonoacetate, thiophosphonoacetate, phosphinate, phosphoramidate, 3′-amino phosphoramidate, aminoalkylphosphoramidate, selenophosphate, thionophosphoramidate, thionoalkylphosphonate, thionoalkylphosphotriester, or boranophosphate linkage.

[0016] In any aspect of this disclosure, some embodiments provide an mdRNA comprising an overhang of one to four nucleotides on at least one 3′-end that is not part of the gap, such as at least one deoxynucleotide or two deoxynucleotides (e.g., thymidine). In some embodiments, at least one or two 5′-terminal ribonucleotide of the second strand within the double-stranded region comprises a 2′-sugar substitution. In related embodiments, at least one or two 5′-terminal ribonucleotide of the first strand within the double-stranded region comprises a 2′-sugar substitution. In other related embodiments, at least one or two 5′-terminal ribonucleotide of the second strand and at least one or two 5′-terminal ribonucleotide of the first strand within the double-stranded regions comprise independent 2′-sugar substitutions. In other embodiments, the mdRNA molecule comprises at least three 5-methyluridines within at least one double-stranded region. In some embodiments, the mdRNA molecule has a blunt end at one or both ends. In other embodiments, the 5′-terminal of the third strand is a hydroxyl or a phosphate.

### BRIEF DESCRIPTION OF THE DRAWINGS

[0017] FIG. 1 shows the gene silencing activity of ten different AKT-specific nicked and gapped dsRNA Dicer substrates. This is the graphical representation of the data found in Table 1 (the Complex numbers on the x-axis correspond to the Set numbers for each of the ten different AKT dsRNAs shown in Table 1).

[0018] FIG. 2 shows knockdown activity for RISC activator lacZ dsRNA (21 nucleotide sense strand/21 nucleotide antisense strand; 21/21), Dicer substrate lacZ dsRNA (25 nucleotide sense strand/27 nucleotide antisense strand; 25/27), and meroduplex lacZ mdRNA (13 nucleotide sense strand and 11 nucleotide sense strand/27 nucleotide antisense strand; 13, 11/27—the sense strand is missing one nucleotide so that a single nucleotide gap is left between the 13 nucleotide and 11 nucleotide sense strands when annealed to the 27 nucleotide antisense strand. Knockdown activities were normalized to a Qneg control dsRNA and presented as a normalized value of Qneg (i.e., Qneg represents 100% or “normal” gene expression levels). A smaller value indicates a greater knockdown effect.

[0019] FIG. 3 shows knockdown activity of a RISC activator influenza dsRNA G1498 (21/21) and nicked dsRNA (10, 11/21) at 100 nM. The “wt” designation indicates an unsubstituted RNA molecule; “rT” indicates RNA having each uridine substituted with a ribothymidine; and “p” indicates that the 5′-nucleotide of that strand was phosphorylated. The 21 nucleotide sense and antisense strands of G1498 were individually nicked between the nucleotides 10 and 11 as measured from the 5′-end, and is referred to as 11, 10/21 and 21/10, 11, respectively. The G1498 single stranded 21 nucleotide antisense strand alone (designated AS-only) was used as a control.

[0020] FIG. 4 shows knockdown activity of a lacZ dicer substrate (25/27) having a nick in one of each of positions 8 to 14 and a one nucleotide gap at position 13 of the sense strand (counted from the 5′-end). A dideoxy guanosine (ddG) was incorporated at the 5′-end of the 3′-most strand of the nicked or gapped sense sequence at position 13.

[0021] FIG. 5 shows knockdown activity of a dicer substrate influenza dsRNA G1498DS (25/27) and this sequence nicked at one of each of positions 8 to 14 of the sense strand, and shows the activity of these nicked molecules that are also phosphorylated or have a locked nucleic acid substitution.

[0022] FIG. 6 shows a dose dependent knockdown activity a dicer substrate influenza dsRNA G1498DS (25/27) and this sequence nicked at position 13 of the sense strand.

[0023] FIG. 7 shows knockdown activity of a dicer substrate influenza dsRNA G1498DS having a nick or a gap of one to six nucleotides that begins at any one of positions 8 to 12 of the sense strand.

[0024] FIG. 8 shows knockdown activity of a LacZ RISC dsRNA having a nick or a gap of one to six nucleotides that begins at any one of positions 8 to 14 of the sense strand.

[0025] FIG. 9 shows knockdown activity of an influenza RISC dsRNA having a nick at any one of positions 8 to 14 of the sense strand and further having one or two locked nucleic acids (LNA) per sense strand. The inserts on the right side of the graph provides a graphic depiction of the meroduplex structures (for clarity, a single antisense strand is shown at the bottom of the grouping with each of the different nicked sense strands above the antisense) having different nick positions with the relative positioning of the LNAs on the sense strands.

[0026] FIG. 10 shows knockdown activity of a LacZ dicer substrate dsRNA having a nick at any one of positions 8 to 14 of the sense strand as compared to the same nicked dicer substrates but having a locked nucleic acid substitution.

[0027] FIG. 11 shows the percent knockdown in influenza viral titers using influenza specific mdRNA against influenza strain WSN.

[0028] FIG. 12 shows the in vivo reduction in PR8 influenza viral titers using influenza specific mdRNA as measured by TCID₅₀.

### DETAILED DESCRIPTION

[0029] The instant disclosure is predicated upon the unexpected discovery that a nicked or gapped double-stranded RNA (dsRNA) comprising at least three strands is a suitable substrate for Dicer or RISC and, therefore, may be advantageously employed for gene silencing via, for example, the RNA interference pathway. That is, partially duplexed dsRNA molecules described herein (also referred to as meroduplexes having a nick or gap in at least one strand) are capable of initiating an RNA interference cascade that modifies (e.g., reduces) expression of a target messenger RNA (mRNA), such as a human v-AKT murine thymoma viral oncogene (AKT). This is surprising because a person of skill in the art would expect the thermodynamically less stable nicked or gapped dsRNA passenger strand (as compared to an intact dsRNA) to fall apart before any gene silencing effect would result (see, e.g., Leuschner et al., EMBO 7:314, 2006).

[0030] Meroduplex ribonucleic acid (mdRNA) molecules described herein include a first (antisense) strand that is complementary to any one of human AKT1 mRNA as set forth in SEQ ID NO:1158, 1159, or 1160, human AKT2 mRNA as set forth in SEQ ID NO:1972, or human AKT3 mRNA as set forth in SEQ ID NO:2483 or 2484, along with second and third strands (together forming a gapped sense strand) that are each complementary to non-overlapping regions of the first strand, wherein the second and third strands can anneal with the first strand to form at least two double-stranded regions separated by a gap, and wherein at least one double-stranded region is optionally from about 5 base pairs to about 15 base pairs, or the combined double-stranded regions total about 5 base pairs to about 40 base pairs and the mdRNA is blunt-ended. The gap can be from 0 nucleotides (i.e., a nick in which only a phosphodiester bond between two nucleotides is broken in a polynucleotide molecule) up to about 10 nucleotides (i.e., the first strand will have at least one unpaired nucleotide). In certain embodiments, the nick or gap is located 10 nucleotides from the 5′-end of the first (antisense) strand or at the Argonaute cleavage site. In another embodiment, the meroduplex nick or gap is positioned such that the thermal stability is maximized for the first and second strand duplex and for the first and third strand duplex as compared to the thermal stability of such meroduplexes having a nick or gap in a different position. Also provided herein are methods of using such dsRNA to reduce expression of an AKT gene in a cell or to treat or prevent diseases or disorders associated with AKT gene expression, including one or more hyperproliferative disorders, including lymphomas, melanomas, prostate cancer, breast cancer, prostate cancer, ovarian cancer, pancreatic cancer, thyroid cancer, and colorectal cancer; cancer metastasis; and one or more inflammatory disorders, including diabetes, and schizophrenia.

[0031] Prior to introducing more detail to this disclosure, it may be helpful to an appreciation thereof to provide definitions of certain terms to be used herein.

[0032] In the present description, any concentration range, percentage range, ratio range, or integer range is to be understood to include the value of any integer within the recited range and, when appropriate, fractions thereof (such as one tenth and one hundredth of an integer), unless otherwise indicated. Also, any number range recited herein relating to any physical feature, such as polymer subunits, size or thickness, are to be understood to include any integer within the recited range, unless otherwise indicated. As used herein, “about” or “consisting essentially of” mean ±20% of the indicated range, value, or structure, unless otherwise indicated. As used herein, the terms “include” and “comprise” are open ended and are used synonymously. It should be understood that the terms “a” and “an” as used herein refer to “one or more” of the enumerated components. The use of the alternative (e.g., “or”) should be understood to mean either one, both, or any combination thereof of the alternatives.

[0033] As used herein, the term “isolated” means that the referenced material (e.g., nucleic acid molecules of the instant disclosure), is removed from its original environment, such as being separated from some or all of the co-existing materials in a natural environment (e.g., a natural environment may be a cell).

[0034] As used herein, “complementary” refers to a nucleic acid molecule that can form hydrogen bond(s) with another nucleic acid molecule or itself by either traditional Watson-Crick base pairing or other non-traditional types of pairing (e.g., Hoogsteen or reversed Hoogsteen hydrogen bonding) between complementary nucleosides or nucleotides. In reference to the nucleic molecules of the present disclosure, the binding free energy for a nucleic acid molecule with its complementary sequence is sufficient to allow the relevant function of the nucleic acid molecule to proceed, for example, RNAi activity, and there is a sufficient degree of complementarity to avoid non-specific binding of the nucleic acid molecule (e.g., dsRNA) to non-target sequences under conditions in which specific binding is desired, i.e., under physiological conditions in the case of in vivo assays or therapeutic treatment, or under conditions in which the assays are performed in the case of in vitro assays (e.g., hybridization assays). Determination of binding free energies for nucleic acid molecules is well known in the art (see, e.g., Turner et al., CSH Symp. Quant. Biol. LII:123, 1987; Frier et al., Proc. Nat'l. Acad. Sci. USA 83:9373, 1986; Turner et al., J. Am. Chem. Soc. 109:3783, 1987). Thus, “complementary” or “specifically hybridizable” or “specifically binds” are terms that indicate a sufficient degree of complementarity or precise pairing such that stable and specific binding occurs between a nucleic acid molecule (e.g., dsRNA) and a DNA or RNA target. It is understood in the art that a nucleic acid molecule need not be 100% complementary to a target nucleic acid sequence to be specifically hybridizable or to specifically bind. That is, two or more nucleic acid molecules may be less than fully complementary and is indicated by a percentage of contiguous residues in a nucleic acid molecule that can form hydrogen bonds with a second nucleic acid molecule.

[0035] For example, a first nucleic acid molecule may have 10 nucleotides and a second nucleic acid molecule may have 10 nucleotides, then base pairing of 5, 6, 7, 8, 9, or 10 nucleotides between the first and second nucleic acid molecules, which may or may not form a contiguous double-stranded region, represents 50%, 60%, 70%, 80%, 90%, and 100% complementarity, respectively. In certain embodiments, complementary nucleic acid molecules may have wrongly paired bases—that is, bases that cannot form a traditional Watson-Crick base pair or other non-traditional types of pair (i.e., “mismatched” bases). For instance, complementary nucleic acid molecules may be identified as having a certain number of “mismatches,” such as zero or about 1, about 2, about 3, about 4 or about 5.

[0036] “Perfectly” or “fully” complementary nucleic acid molecules means those in which a certain number of nucleotides of a first nucleic acid molecule hydrogen bond (anneal) with the same number of residues in a second nucleic acid molecule to form a contiguous double-stranded region. For example, two or more fully complementary nucleic acid molecule strands can have the same number of nucleotides (i.e., have the same length and form one double-stranded region, with or without an overhang) or have a different number of nucleotides (e.g., one strand may be shorter than but fully contained within another strand or one strand may overhang the other strand).

[0037] By “ribonucleic acid” or “RNA” is meant a nucleic acid molecule comprising at least one ribonucleotide molecule. As used herein, “ribonucleotide” refers to a nucleotide with a hydroxyl group at the 2′-position of a β-D-ribofuranose moiety. The term RNA includes double-stranded (ds) RNA, single-stranded (ss) RNA, isolated RNA (such as partially purified RNA, essentially pure RNA, synthetic RNA, recombinantly produced RNA), altered RNA (which differs from naturally occurring RNA by the addition, deletion, substitution or alteration of one or more nucleotides), or any combination thereof. For example, such altered RNA can include addition of non-nucleotide material, such as at one or both ends of an RNA molecule, internally at one or more nucleotides of the RNA, or any combination thereof. Nucleotides in RNA molecules of the instant disclosure can also comprise non-standard nucleotides, such as naturally occurring nucleotides, non-naturally occurring nucleotides, chemically-modified nucleotides, deoxynucleotides, or any combination thereof. These altered RNAs may be referred to as analogs or analogs of RNA containing standard nucleotides (i.e., standard nucleotides, as used herein, are considered to be adenine, cytidine, guanidine, thymidine, and uridine).

[0038] The term “dsRNA” as used herein, which is interchangeable with “mdRNA,” refers to any nucleic acid molecule comprising at least one ribonucleotide molecule and capable of inhibiting or down regulating gene expression, for example, by promoting RNA interference (“RNAi”) or gene silencing in a sequence-specific manner. The dsRNAs (mdRNAs) of the instant disclosure may be suitable substrates for Dicer or for association with RISC to mediate gene silencing by RNAi. Examples of dsRNA molecules of this disclosure are provided in the Sequence Listing identified herein. One or both strands of the dsRNA can further comprise a terminal phosphate group, such as a 5′-phosphate or 5′,3′-diphosphate. As used herein, dsRNA molecules, in addition to at least one ribonucleotide, can further include substitutions, chemically-modified nucleotides, and non-nucleotides. In certain embodiments, dsRNA molecules comprise ribonucleotides up to about 100% of the nucleotide positions.

[0039] In addition, as used herein, the term dsRNA is meant to be equivalent to other terms used to describe nucleic acid molecules that are capable of mediating sequence specific RNAi, for example, meroduplex RNA (mdRNA), nicked dsRNA (ndsRNA), gapped dsRNA (gdsRNA), short interfering nucleic acid (siNA), siRNA, micro-RNA (miRNA), short hairpin RNA (shRNA), short interfering oligonucleotide, short interfering substituted oligonucleotide, short interfering modified oligonucleotide, chemically-modified dsRNA, post-transcriptional gene silencing RNA (ptgsRNA), or the like. The term “large double-stranded RNA” (“large dsRNA”) refers to any double-stranded RNA longer than about 40 base pairs (bp) to about 100 bp or more, particularly up to about 300 bp to about 500 bp. The sequence of a large dsRNA may represent a segment of an mRNA or an entire mRNA. A double-stranded structure may be formed by a self-complementary nucleic acid molecule or by annealing of two or more distinct complementary nucleic acid molecule strands.

[0040] In one aspect, a dsRNA comprises two separate oligonucleotides, comprising a first strand (antisense) and a second strand (sense), wherein the antisense and sense strands are self-complementary (i.e., each strand comprises a nucleotide sequence that is complementary to a nucleotide sequence in the other strand and the two separate strands form a duplex or double-stranded structure, for example, wherein the double-stranded region is about 15 to about 24 base pairs or about 26 to about 40 base pairs); the antisense strand comprises a nucleotide sequence that is complementary to a nucleotide sequence in a target nucleic acid molecule or a portion thereof (e.g., a human AKT mRNA as set forth in any one of SEQ ID NOS:1158-1160, 1972, 2483, or 2484); and the sense strand comprises a nucleotide sequence corresponding (i.e., homologous) to the target nucleic acid sequence or a portion thereof (e.g., a sense strand of about 15 to about 25 nucleotides or about 26 to about 40 nucleotides corresponds to the target nucleic acid or a portion thereof).

[0041] In another aspect, the dsRNA is assembled from a single oligonucleotide in which the self-complementary sense and antisense strands of the dsRNA are linked together by a nucleic acid based-linker or a non-nucleic acid-based linker. In certain embodiments, the first (antisense) and second (sense) strands of the dsRNA molecule are covalently linked by a nucleotide or non-nucleotide linker as described herein and known in the art. In other embodiments, a first dsRNA molecule is covalently linked to at least one second dsRNA molecule by a nucleotide or non-nucleotide linker known in the art, wherein the first dsRNA molecule can be linked to a plurality of other dsRNA molecules that can be the same or different, or any combination thereof. In another embodiment, the linked dsRNA may include a third strand that forms a meroduplex with the linked dsRNA.

[0042] In still another aspect, dsRNA molecules described herein form a meroduplex RNA (mdRNA) having three or more strands such as, for example, an ‘A’ (first or antisense) strand, ‘S1’ (second) strand, and ‘S2’ (third) strand in which the ‘S1’ and ‘S2’ strands are complementary to and form base pairs (bp) with non-overlapping regions of the ‘A’ strand (e.g., an mdRNA can have the form of A:S1S2). The double-stranded region formed by the annealing of the ‘S1’ and ‘A’ strands is distinct from and non-overlapping with the double-stranded region formed by the annealing of the ‘S2’ and ‘A’ strands. An mdRNA molecule is a “gapped” molecule, i.e., it contains a “gap” ranging from 0 nucleotides up to about 10 nucleotides (or a gap of 11, 12, 13, 14, 15, 16, 17, 18, 19, 20, 21, 22, 23, 24, 25, 26, 27, 28, 29, 30, 31, 32, 33, 34 or 35 nucleotides). In one embodiment, the A:S1 duplex is separated from the A:S2 duplex by a gap resulting from at least one unpaired nucleotide (up to about 10 unpaired nucleotides) in the ‘A’ strand that is positioned between the A:S1 duplex and the A:S2 duplex and that is distinct from any one or more unpaired nucleotide at the 3′-end of one or more of the ‘A’, ‘S1’, or ‘S2’ strands. In another embodiment, the A:S1 duplex is separated from the A:S2 duplex by a gap of zero nucleotides (i.e., a nick in which only a phosphodiester bond between two nucleotides is broken or missing in the polynucleotide molecule) between the A:S1 duplex and the A:S2 duplex—which can also be referred to as nicked dsRNA (ndsRNA). For example, A:S1S2 may be comprised of a dsRNA having at least two double-stranded regions that combined total about 14 base pairs to about 40 base pairs and the double-stranded regions are separated by a gap of (or a gap of 11, 12, 13, 14, 15, 16, 17, 18, 19, 20, 21, 22, 23, 24, 25, 26, 27, 28, 29, 30, 31, 32, 33, 34 or 35 nucleotides) nucleotides, optionally having blunt ends, or A:S1S2 may comprise a dsRNA having at least two double-stranded regions spaced apart by up to 10 nucleotides and thereby forming a gap between the second and third strands wherein at least one of the double-stranded regions optionally has from 5 base pairs to 13 base pairs.

[0043] A dsRNA or large dsRNA may include a substitution or modification in which the substitution or modification may be in a phosphate backbone bond, a sugar, a base, or a nucleoside. Such nucleoside substitutions can include natural non-standard nucleosides (e.g., 5-methyluridine or 5-methylcytidine or a 2-thioribothymidine), and such backbone, sugar, or nucleoside modifications can include an alkyl or heteroatom substitution or addition, such as a methyl, alkoxyalkyl, halogen, nitrogen or sulfur, or other modifications known in the art.

[0044] In addition, as used herein, the term “RNAi” is meant to be equivalent to other terms used to describe sequence specific RNA interference, such as post transcriptional gene silencing, translational inhibition, or epigenetics. For example, dsRNA molecules of this disclosure can be used to epigenetically silence genes at the post-transcriptional level or the pre-transcriptional level or any combination thereof.

[0045] As used herein, “target nucleic acid” refers to any nucleic acid sequence whose expression or activity is to be altered (e.g., AKT). The target nucleic acid can be DNA, RNA, or analogs thereof, and includes single, double, and multi-stranded forms. By “target site” or “target sequence” is meant a sequence within a target nucleic acid (e.g., mRNA) that, when present in an RNA molecule, is “targeted” for cleavage by RNAi and mediated by a dsRNA construct of this disclosure containing a sequence within the antisense strand that is complementary to the target site or sequence.

[0046] As used herein, “off-target effect” or “off-target profile” refers to the observed altered expression pattern of one or more genes in a cell or other biological sample not targeted, directly or indirectly, for gene silencing by an mdRNA or dsRNA. For example, an off-target effect can be quantified by using a DNA microarray to determine how many non-target genes have an expression level altered by about two-fold or more in the presence of a candidate mdRNA or dsRNA, or analog thereof specific for a target sequence, such as an AKT mRNA. A “minimal off-target effect” means that an mdRNA or dsRNA affects expression by about two-fold or more of about 25% to about 1% of the non-target genes examined or it means that the off-target effect of substituted or modified mdRNA or dsRNA (e.g., having at least one uridine substituted with a 5-methyluridine or 2-thioribothymidine and optionally having at least one nucleotide modified at the 2′-position), is reduced by at least about 1% to about 80% or more as compared to the effect on non-target genes of an unsubstituted or unmodified mdRNA or dsRNA.

[0047] By “sense region” or “sense strand” is meant one or more nucleotide sequences of a dsRNA molecule having complementarity to one or more antisense regions of the dsRNA molecule. In addition, the sense region of a dsRNA molecule comprises a nucleic acid sequence having homology or identity to a target sequence, such as AKT. By “antisense region” or “antisense strand” is meant a nucleotide sequence of a dsRNA molecule having complementarity to a target nucleic acid sequence, such as AKT. In addition, the antisense region of a dsRNA molecule can comprise nucleic acid sequence region having complementarity to one or more sense strands of the dsRNA molecule.

[0048] “Analog” as used herein refers to a compound that is structurally similar to a parent compound (e.g., a nucleic acid molecule), but differs slightly in composition (e.g., one atom or functional group is different, added, or removed). The analog may or may not have different chemical or physical properties than the original compound and may or may not have improved biological or chemical activity. For example, the analog may be more hydrophilic or it may have altered activity as compared to a parent compound. The analog may mimic the chemical or biological activity of the parent compound (i.e., it may have similar or identical activity), or, in some cases, may have increased or decreased activity. The analog may be a naturally or non-naturally occurring (e.g., chemically-modified or recombinant) variant of the original compound. An example of an RNA analog is an RNA molecule having a non-standard nucleotide, such as 5-methyluridine or 5-methylcytidine or 2-thioribothymidine, which may impart certain desirable properties (e.g., improve stability, bioavailability, minimize off-target effects or interferon response).

[0049] As used herein, the term “universal base” refers to nucleotide base analogs that form base pairs with each of the standard DNA/RNA bases with little discrimination between them. A universal base is thus interchangeable with all of the standard bases when substituted into a nucleotide duplex (see, e.g., Loakes et al., J. Mol. Bio. 270:426, 1997). Exemplary universal bases include C-phenyl, C-naphthyl and other aromatic derivatives, inosine, azole carboxamides, or nitroazole derivatives such as 3-nitropyrrole, 4-nitroindole, 5-nitroindole, and 6-nitroindole (see, e.g., Loakes, Nucleic Acids Res. 29:2437, 2001).

[0050] The term “gene” as used herein, especially in the context of “target gene” or “gene target” for RNAi, means a nucleic acid molecule that encodes an RNA or a transcription product of such gene, including a messenger RNA (mRNA, also referred to as structural genes that encode for a polypeptide), an mRNA splice variant of such gene, a functional RNA (fRNA), or non-coding RNA (ncRNA), such as small temporal RNA (stRNA), microRNA (miRNA), small nuclear RNA (snRNA), short interfering RNA (siRNA), small nucleolar RNA (snRNA), ribosomal RNA (rRNA), transfer RNA (tRNA) and precursor RNAs thereof. Such non-coding RNAs can serve as target nucleic acid molecules for dsRNA mediated RNAi to alter the activity of the target RNA involved in functional or regulatory cellular processes.

[0051] As used herein, “gene silencing” refers to a partial or complete loss-of-function through targeted inhibition of gene expression in a cell, which may also be referred to as RNAi “knockdown,” “inhibition,” “down-regulation,” or “reduction” of expression of a target gene, such as a human AKT gene. Depending on the circumstances and the biological problem to be addressed, it may be preferable to partially reduce gene expression. Alternatively, it might be desirable to reduce gene expression as much as possible. The extent of silencing may be determined by methods described herein and known in the art (see, e.g., PCT Publication No. WO 99/32619; Elbashir et al., EMBO J. 20:6877, 2001). Depending on the assay, quantification of gene expression permits detection of various amounts of inhibition that may be desired in certain embodiments of this disclosure, including prophylactic and therapeutic methods, which will be capable of knocking down target gene expression, in terms of mRNA level or protein level or activity, for example, by equal to or greater than 10%, 30%, 50%, 75% 90%, 95% or 99% of baseline (i.e., normal) or other control levels, including elevated expression levels as may be associated with particular disease states or other conditions targeted for therapy.

[0052] As used herein, the term “therapeutically effective amount” means an amount of dsRNA that is sufficient to result in a decrease in severity of disease symptoms, an increase in frequency or duration of disease symptom-free periods, or a prevention of impairment or disability due to the disease, in the subject (e.g., human) to which it is administered. For example, a therapeutically effective amount of dsRNA directed against an mRNA of AKT (e.g., any one of human AKT mRNA as set forth in SEQ ID NO:1158-1160, 1972, 2483, or 2484) can inhibit the deposition of lipoproteins in the walls of arteries by at least about 20%, at least about 40%, at least about 60%, or at least about 80% relative to untreated subjects. A therapeutically effective amount of a therapeutic compound can decrease, for example, atheromatous plaque size or otherwise ameliorate symptoms in a subject. One of ordinary skill in the art would be able to determine such therapeutically effective amounts based on such factors as the subject's size, the severity of symptoms, and the particular composition or route of administration selected. The nucleic acid molecules of the instant disclosure, individually, or in combination or in conjunction with other drugs, can be used to treat diseases or conditions discussed herein. For example, to treat a particular disease, disorder, or condition, the dsRNA molecules can be administered to a patient or can be administered to other appropriate cells evident to those skilled in the art, individually or in combination with one or more drugs, under conditions suitable for treatment.

[0053] In addition, one or more dsRNA may be used to knockdown expression of an AKT mRNA as set forth in any one of SEQ ID NO:1158-1160, 1972, 2483, or 2484, or a related mRNA splice variant. In this regard it is noted that an AKT gene may be transcribed into two or more mRNA splice variants; and thus, for example, in certain embodiments, knockdown of one mRNA splice variant without affecting the other mRNA splice variant may be desired, or vice versa; or knockdown of all transcription products may be targeted.

[0054] In addition, it should be understood that the individual compounds, or groups of compounds, derived from the various combinations of the structures and substituents described herein, are disclosed by the present application to the same extent as if each compound or group of compounds was set forth individually. Thus, selection of particular structures or particular substituents is within the scope of the present disclosure. As described herein, all value ranges are inclusive over the indicated range. Thus, a range of C₁-C₄ will be understood to include the values of 1, 2, 3, and 4, such that C₁, C₂, C₃ and C₄ are included.

[0055] The term “alkyl” as used herein refers to saturated straight- or branched-chain aliphatic groups containing from 1-20 carbon atoms, preferably 1-8 carbon atoms and most preferably 1-4 carbon atoms. This definition applies as well to the alkyl portion of alkoxy, alkanoyl and aralkyl groups. The alkyl group may be substituted or unsubstituted. In certain embodiments, the alkyl is a (C₁-C₄)alkyl or methyl.

[0056] The term “cycloalkyl” as used herein refers to a saturated cyclic hydrocarbon ring system containing from 3 to 12 carbon atoms that may be optionally substituted. Exemplary embodiments include, but are not limited to, cyclopropyl, cyclobutyl, cyclopentyl and cyclohexyl. In certain embodiments, the cycloalkyl group is cyclopropyl. In another embodiment, the (cycloalkyl)alkyl groups contain from 3 to 12 carbon atoms in the cyclic portion and 1 to 6 carbon atoms in the alkyl portion. In certain embodiments, the (cycloalkyl)alkyl group is cyclopropylmethyl. The alkyl groups are optionally substituted with from one to three substituents selected from the group consisting of halogen, hydroxy and amino.

[0057] The terms “alkanoyl” and “alkanoyloxy” as used herein refer, respectively, to —C(O)-alkyl groups and —O—C(═O)— alkyl groups, each optionally containing 2 to 10 carbon atoms. Specific embodiments of alkanoyl and alkanoyloxy groups are acetyl and acetoxy, respectively.

[0058] The term “alkenyl” refers to an unsaturated branched, straight-chain or cyclic alkyl group having 2 to 15 carbon atoms and having at least one carbon-carbon double bond derived by the removal of one hydrogen atom from a single carbon atom of a parent alkene. The group may be in either the cis or trans conformation about the double bond(s). Certain embodiments include ethenyl, 1-propenyl, 2-propenyl, 1-methylethenyl, 1-butenyl, 2-butenyl, 3-butenyl, 2-methyl-2-propenyl, 1-pentenyl, 2-pentenyl, 4-pentenyl, 3-methyl-2-butenyl, 1-hexenyl, 2-hexenyl, 1-heptenyl, 2-heptenyl, 1-octenyl, 2-octenyl, 1,3-octadienyl, 2-nonenyl, 1,3-nonadienyl, 2-decenyl, etc., or the like. The alkenyl group may be substituted or unsubstituted.

[0059] The term “alkynyl” as used herein refers to an unsaturated branched, straight-chain, or cyclic alkyl group having 2 to 10 carbon atoms and having at least one carbon-carbon triple bond derived by the removal of one hydrogen atom from a single carbon atom of a parent alkyne. Exemplary alkynyls include ethynyl, 1-propynyl, 2-propynyl, 1-butynyl, 2-butynyl, 3-butynyl, 1-pentynyl, 2-pentynyl, 4-pentynyl, 1-octynyl, 6-methyl-1-heptynyl, 2-decynyl, or the like. The alkynyl group may be substituted or unsubstituted.

[0060] The term “hydroxyalkyl” alone or in combination, refers to an alkyl group as previously defined, wherein one or several hydrogen atoms, preferably one hydrogen atom has been replaced by a hydroxyl group. Examples include hydroxymethyl, hydroxyethyl and 2-hydroxyethyl.

[0061] The term “aminoalkyl” as used herein refers to the group —NRR′, where R and R′ may independently be hydrogen or (C₁-C₄)alkyl.

[0062] The term “alkylaminoalkyl” refers to an alkylamino group linked via an alkyl group (i.e., a group having the general structure -alkyl-NH-alkyl or -alkyl-N(alkyl)(alkyl)). Such groups include, but are not limited to, mono- and di-(C₁-C₈ alkyl)aminoC₁-C₈ alkyl, in which each alkyl may be the same or different.

[0063] The term “dialkylaminoalkyl” refers to alkylamino groups attached to an alkyl group. Examples include, but are not limited to, N,N-dimethylaminomethyl, N,N-dimethylaminoethyl N,N-dimethylaminopropyl, and the like. The term dialkylaminoalkyl also includes groups where the bridging alkyl moiety is optionally substituted.

[0064] The term “haloalkyl” refers to an alkyl group substituted with one or more halo groups, for example chloromethyl, 2-bromoethyl, 3-iodopropyl, trifluoromethyl, perfluoropropyl, 8-chlorononyl, or the like.

[0065] The term “carboxyalkyl” as used herein refers to the substituent —R¹⁰—COOH, wherein R¹⁰ is alkylene; and “carbalkoxyalkyl” refers to —R¹⁰—C(═O)OR¹¹, wherein R¹⁰ and R¹¹ are alkylene and alkyl respectively. In certain embodiments, alkyl refers to a saturated straight- or branched-chain hydrocarbyl radical of 1 to 6 carbon atoms such as methyl, ethyl, n-propyl, isopropyl, n-butyl, t-butyl, n-pentyl, 2-methylpentyl, n-hexyl, and so forth. Alkylene is the same as alkyl except that the group is divalent.

[0066] The term “alkoxy” includes substituted and unsubstituted alkyl, alkenyl, and alkynyl groups covalently linked to an oxygen atom. In one embodiment, the alkoxy group contains 1 to about 10 carbon atoms. Embodiments of alkoxy groups include, but are not limited to, methoxy, ethoxy, isopropyloxy, propoxy, butoxy, and pentoxy groups. Embodiments of substituted alkoxy groups include halogenated alkoxy groups. In a further embodiment, the alkoxy groups can be substituted with groups such as alkenyl, alkynyl, halogen, hydroxyl, alkylcarbonyloxy, arylcarbonyloxy, alkoxycarbonyloxy, aryloxycarbonyloxy, carboxylate, alkylcarbonyl, arylcarbonyl, alkoxycarbonyl, aminocarbonyl, alkylaminocarbonyl, dialkylaminocarbonyl, alkylthiocarbonyl, alkoxyl, phosphate, phosphonato, phosphinato, cyano, amino (including alkylamino, dialkylamino, arylamino, diarylamino, and alkylarylamino), acylamino (including alkylcarbonylamino, arylcarbonylamino, carbamoyl and ureido), amidino, imino, sulfhydryl, alkylthio, arylthio, thiocarboxylate, sulfates, alkylsulfinyl, sulfonato, sulfamoyl, sulfonamido, nitro, trifluoromethyl, cyano, azido, heterocyclyl, alkylaryl, or an aromatic or heteroaromatic moieties. Exemplary halogen substituted alkoxy groups include, but are not limited to, fluoromethoxy, difluoromethoxy, trifluoromethoxy, chloromethoxy, dichloromethoxy, and trichloromethoxy.

[0067] The term “alkoxyalkyl” refers to an alkylene group substituted with an alkoxy group. For example, methoxyethyl (CH₃OCH₂CH₂—) and ethoxymethyl (CH₃CH₂OCH₂—) are both C₃ alkoxyalkyl groups.

[0068] The term “aryl” as used herein refers to monocyclic or bicyclic aromatic hydrocarbon groups having from 6 to 12 carbon atoms in the ring portion, for example, phenyl, naphthyl, biphenyl and diphenyl groups, each of which may be substituted with, for example, one to four substituents such as alkyl; substituted alkyl as defined above, halogen, trifluoromethyl, trifluoromethoxy, hydroxy, alkoxy, cycloalkyloxy, alkanoyl, alkanoyloxy, amino, alkylamino, dialkylamino, nitro, cyano, carboxy, carboxyalkyl, carbamyl, carbamoyl and aryloxy. Specific embodiments of aryl groups in accordance with the present disclosure include phenyl, substituted phenyl, naphthyl, biphenyl, and diphenyl.

[0069] The term “aroyl,” as used alone or in combination herein, refers to an aryl radical derived from an aromatic carboxylic acid, such as optionally substituted benzoic or naphthoic acids.

[0070] The term “aralkyl” as used herein refers to an aryl group bonded to the 2-pyridinyl ring or the 4-pyridinyl ring through an alkyl group, preferably one containing 1 to 10 carbon atoms. A preferred aralkyl group is benzyl.

[0071] The term “carboxy,” as used herein, represents a group of the formula —C(═O)OH or —C(═O)O⁻.

[0072] The term “carbonyl” as used herein refers to a group in which an oxygen atom is double-bonded to a carbon atom —C═O.

[0073] The term “trifluoromethyl” as used herein refers to —CF₃.

[0074] The term “trifluoromethoxy” as used herein refers to —OCF₃.

[0075] The term “hydroxyl” as used herein refers to —OH or —O⁻.

[0076] The term “nitrile” or “cyano” as used herein refers to the group —CN.

[0077] The term “nitro,” as used herein alone or in combination refers to a —NO₂ group.

[0078] The term “amino” as used herein refers to the group —NR⁹R⁹, wherein R⁹ may independently be hydrogen, alkyl, aryl, alkoxy, or heteroaryl. The term “aminoalkyl” as used herein represents a more detailed selection as compared to “amino” and refers to the group —NR′R′, wherein R′ may independently be hydrogen or (C₁-C₄)alkyl. The term “dialkylamino” refers to an amino group having two attached alkyl groups that can be the same or different.

[0079] The term “alkanoylamino” refers to alkyl, alkenyl or alkynyl groups containing the group —C(═O)— followed by —N(H)—, for example acetylamino, propanoylamino and butanoylamino and the like.

[0080] The term “carbonylamino” refers to the group —NR′—CO—CH₂—R′, wherein R′ may be independently selected from hydrogen or (C₁-C₄)alkyl.

[0081] The term “carbamoyl” as used herein refers to —O—C(O)NH₂.

[0082] The term “carbamyl” as used herein refers to a functional group in which a nitrogen atom is directly bonded to a carbonyl, i.e., as in —NR″C(═O)R″ or —C(═O)NR″R″, wherein R″ can be independently hydrogen, alkyl, substituted alkyl, alkenyl, substituted alkenyl, alkoxy, cycloalkyl, aryl, heterocyclo, or heteroaryl.

[0083] The term “alkylsulfonylamino” refers to the group —NHS(O)₂R¹², wherein R¹² is alkyl.

[0084] The term “halogen” as used herein refers to bromine, chlorine, fluorine or iodine. In one embodiment, the halogen is fluorine. In another embodiment, the halogen is chlorine.

[0085] The term “heterocyclo” refers to an optionally substituted, unsaturated, partially saturated, or fully saturated, aromatic or nonaromatic cyclic group that is a 4 to 7 membered monocyclic, or 7 to 11 membered bicyclic ring system that has at least one heteroatom in at least one carbon atom-containing ring. The substituents on the heterocyclo rings may be selected from those given above for the aryl groups. Each ring of the heterocyclo group containing a heteroatom may have 1, 2, or 3 heteroatoms selected from nitrogen, oxygen or sulfur. Plural heteroatoms in a given heterocyclo ring may be the same or different.

[0086] Exemplary monocyclic heterocyclo groups include pyrrolidinyl, pyrrolyl, indolyl, pyrazolyl, imidazolyl, oxazolyl, isoxazolyl, thiazolyl, furyl, tetrahydrofuryl, thienyl, piperidinyl, piperazinyl, azepinyl, pyrimidinyl, pyridazinyl, tetrahydropyranyl, morpholinyl, dioxanyl, triazinyl and triazolyl. Preferred bicyclic heterocyclo groups include benzothiazolyl, benzoxazolyl, benzothienyl, quinolinyl, tetrahydroisoquinolinyl, benzimidazolyl, benzofuryl, indazolyl, benzisothiazolyl, isoindolinyl and tetrahydroquinolinyl. In more detailed embodiments heterocyclo groups may include indolyl, imidazolyl, furyl, thienyl, thiazolyl, pyrrolidyl, pyridyl and pyrimidyl.

[0087] “Substituted” refers to a group in which one or more hydrogen atoms are each independently replaced with the same or different substituent(s). Representative substituents include —X, —R⁶, —O—, ═O, —OR⁶, —SR⁶, —S—, ═S, —NR⁶R⁶, ═NR⁶, —CX₃, —CF₃, —CN, —OCN, —SCN, —NO, —NO₂, ═N₂, —N₃, —S(═O)₂O—, —S(═O)₂OH, —S(═O)₂R⁶, —OS(═O)₂O—, —OS(═O)₂OH, —OS(═O)₂R⁶, —P(═O)(O—)₂, —P(═O)(OH)(O—), —OP(═O)₂(O⁻), —C(—O)R⁶, —C(═S)R⁶, —C(═O)OR⁶, —C(═O)O—, —C(═S)OR⁶, —NR⁶—C(═O)—N(R⁶)₂, —NR⁶—C(═S)—N(R⁶)₂, and —C(═NR⁶)NR⁶R⁶, wherein each X is independently a halogen; and each R⁶ is independently hydrogen, halogen, alkyl, aryl, arylalkyl, arylaryl, arylheteroalkyl, heteroaryl, heteroarylalkyl, NR⁷R⁷, —C(═O)R⁷, and —S(═O)₂R⁷; and each R⁷ is independently hydrogen, alkyl, alkanyl, alkynyl, aryl, arylalkyl, arylheteralkyl, arylaryl, heteroaryl or heteroarylalkyl. Aryl containing substituents, whether or not having one or more substitutions, may be attached in a para (p-), meta (m-) or ortho (o-) conformation, or any combination thereof.

V-AKT Murine Thymoma Viral Oncogene (AKT) and Exemplary dsRNA Molecules

[0088] The product of the v-AKT murine thymoma viral oncogene homolog 1 gene (AKT1; also known as PKB, RAC, PRKBA, MGC99656, and RAC-ALPHA), v-AKT murine thymoma viral oncogene homolog 2 gene (AKT2; also known as PRKBB, PKBBETA, and RAC-BETA), and v-AKT murine thymoma viral oncogene homolog 3 gene (AKT3; also known as PKBG, PRKBG, STK-2, RAC-gamma, RAC-PK-gamma, DKFZP434N0250, AKT3-1, and AKT3-2) are signalling proteins that respond to a large number of signals. Mutation or overexpression of AKT1, AKT2, or AKT3 that increases activity is associated with a variety of disorders including, for example, cancer, diabetes, and schizophrenia.

[0089] More detail regarding AKT1, AKT2, and AKT3 and related disorders are described at www.ncbi.nlm.nih.gov/entrez/query.fcgi?db=OMIM, which is in the Online Mendelian Inheritance in Man database (OMIM Accession Nos. 164730, 164731, and 611223, respectively). The complete mRNA sequences for human AKT1 (variants 1-3), AKT2, and AKT3 (variants 1 and 2) have Genbank accession numbers NM_{—}005163.2 (variant 1, SEQ ID NO:1158), NM_{—}001014432.1 (variant 2, SEQ ID NO:1159), NM_{—}001014431.1 (variant 3, SEQ ID NO:1160); NM_{—}001626.3 (SEQ ID NO:1972); NM_{—}005465.3 (variant 1, SEQ ID NO:2483) and NM_{—}181690.1 (variant 2, SEQ ID NO:2484), respectively. As used herein, reference to AKT1 (variants 1-3), AKT2, or AKT3 (variants 1 and 2) mRNA or RNA sequences or sense strands means an RNA isoform as set forth in any one of SEQ ID NOS:1158-1160, 1972, 2483, and 2484, as well as variants and homologs having at least 80% or more identity with human AKT1 (variants 1-3), AKT2, or AKT3 (variants 1 and 2) mRNA sequence as set forth in any one of SEQ ID NO:1158, 1972, 2483, and 2484, respectively.

[0090] The “percent identity” between two or more nucleic acid sequences is a function of the number of identical positions shared by the sequences (i.e., % identity=number of identical positions/total number of positions×100), taking into account the number of gaps, and the length of each gap that needs to be introduced to optimize alignment of two or more sequences. The comparison of sequences and determination of percent identity between two or more sequences can be accomplished using a mathematical algorithm, such as BLAST and Gapped BLAST programs at their default parameters (e.g., BLASTN, see www.ncbi.nlm.nih.gov/BLAST; see also Altschul et al., J. Mol. Biol. 215:403, 1990).

[0091] In one aspect, the instant disclosure provides an mdRNA molecule, comprising a first strand that is complementary to AKT mRNA as set forth in any one of SEQ ID NO:1158-1160, 1972, 2483, or 2484, and a second strand and a third strand that are each complementary to non-overlapping regions of the first strand, wherein the second strand and third strands can anneal with the first strand to form at least two double-stranded regions spaced apart by up to 10 nucleotides and thereby forming a gap between the second and third strands, and wherein (a) the mdRNA molecule optionally includes at least one double-stranded region comprises from about 5 base pairs to 13 base pairs, or (b) wherein the combined double-stranded regions total about 15 base pairs to about 40 base pairs and the mdRNA molecule optionally has blunt ends; wherein at least one pyrimidine of the mdRNA is a pyrimidine nucleoside according to Formula I or II:

[chemical structure]

wherein R¹ and R² are each independently a —H, —OH, —OCH₃, —OCH₂OCH₂CH₃, —OCH₂CH₂OCH₃, halogen, substituted or unsubstituted C₁-C₁₀ alkyl, alkoxy, alkoxyalkyl, hydroxyalkyl, carboxyalkyl, alkylsulfonylamino, aminoalkyl, dialkylamino, alkylaminoalkyl, dialkylaminoalkyl, haloalkyl, trifluoromethyl, cycloalkyl, (cycloalkyl)alkyl, substituted or unsubstituted C₂-C₁₀ alkenyl, substituted or unsubstituted —O-allyl, —O—CH₂CH═CH₂, —O—CH═CHCH₃, substituted or unsubstituted C₂-C₁₀ alkynyl, carbamoyl, carbamyl, carboxy, carbonylamino, substituted or unsubstituted aryl, substituted or unsubstituted aralkyl, —NH₂, —NO₂, —C≡N, or heterocyclo group; R³ and R⁴ are each independently a hydroxyl, a protected hydroxyl, a phosphate, or an internucleoside linking group; and R⁵ and R⁸ are each independently O or S. In certain embodiments, at least one nucleoside is according to Formula I in which R¹ is methyl and R² is —OH, or R¹ is methyl, R² is —OH, and R⁸ is S. In other embodiments, the internucleoside linking group covalently links from about 5 to about 40 nucleosides. In some embodiments, the gap comprises at least one unpaired nucleotide in the first strand positioned between the double-stranded regions formed by the second and third strands when annealed to the first strand, or the gap is a nick. In certain embodiments, the nick or gap is located 10 nucleotides from the 5′-end of the first (antisense) strand or at the Argonaute cleavage site. In another embodiment, the meroduplex nick or gap is positioned such that the thermal stability is maximized for the first and second strand duplex and for the first and third strand duplex as compared to the thermal stability of such meroduplexes having a nick or gap in a different position.

[0092] In still another aspect, the instant disclosure provides an mdRNA molecule, comprising a first strand that is complementary to v-AKT murine thymoma viral oncogene (AKT) mRNA as set forth in any one of SEQ ID NO:1158, 1159, 1160, 1972, 2483, or 2484, and a second strand and a third strand that are each complementary to non-overlapping regions of the first strand, wherein the second strand and third strands can anneal with the first strand to form at least two double-stranded regions spaced apart by up to 10 nucleotides and thereby forming a gap between the second and third strands, and wherein the mdRNA molecule optionally includes at least one double-stranded region comprising from 5 base pairs to 13 base pairs. In a further aspect, the instant disclosure provides an mdRNA molecule having a first strand that is complementary to an AKT mRNA as set forth in any one of SEQ ID NO:1158, 1159, 1160, 1972, 2483, or 2484, and a second strand and a third strand that are each complementary to non-overlapping regions of the first strand, wherein the second strand and third strands can anneal with the first strand to form at least two double-stranded regions spaced apart by up to 10 nucleotides and thereby forming a gap between the second and third strands, and wherein the combined double-stranded regions total about 15 base pairs to about 40 base pairs and the mdRNA molecule optionally has blunt ends. In some embodiments, the gap comprises at least one unpaired nucleotide in the first strand positioned between the double-stranded regions formed by the second and third strands when annealed to the first strand, or the gap is a nick. In certain embodiments, the nick or gap is located 10 nucleotides from the 5′-end of the first (antisense) strand or at the Argonaute cleavage site. In another embodiment, the meroduplex nick or gap is positioned such that the thermal stability is maximized for the first and second strand duplex and for the first and third strand duplex as compared to the thermal stability of such meroduplexes having a nick or gap in a different position.

[0093] As provided herein, any of the aspects or embodiments disclosed herein would be useful in treating AKT-associated diseases or disorders, such as one or more hyperproliferative disorders, including lymphomas, melanomas, prostate cancer, breast cancer, prostate cancer, ovarian cancer, pancreatic cancer, thyroid cancer, and colorectal cancer; cancer metastasis; and one or more inflammatory disorders, including diabetes, and schizophrenia.

[0094] In some embodiments, the dsRNA comprises at least three strands in which the first strand comprises about 5 nucleotides to about 40 nucleotides, and the second and third strands include each, individually, about 5 nucleotides to about 20 nucleotides, wherein the combined length of the second and third strands is about 15 nucleotides to about 40 nucleotides. In other embodiments, the dsRNA comprises at least two strands in which the first strand comprises about 15 to about 24 nucleotides or about 25 nucleotides to about 40 nucleotides. In yet other embodiments, the first strand comprises about 15 to about 24 nucleotides or about 25 nucleotides to about 40 nucleotides and is complementary to at least about 15, 16, 17, 18, 19, 20, 21, 22, 23, 24, 25, 26, 27, 28, 29, 30, 31, 32, 33, 34, 35, 36, 37, 38, 39, or 40 contiguous nucleotides of any one of human AKT1 mRNA as set forth in SEQ ID NO:1158, 1159, or 1160, human AKT2 mRNA as set forth in SEQ ID NO:1972, or human AKT3 mRNA as set forth in SEQ ID NO:2483 or 2484. In alternative embodiments, the first strand comprises about 15 to about 24 nucleotides or about 25 nucleotides to about 40 nucleotides and is at least about 70%, 75%, 80%, 85%, 90%, 91%, 92%, 93%, 94%, 95%, 96%, 97%, 98%, or 99% identical to a sequence that is complementary to at least about 15, 16, 17, 18, 19, 20, 21, 22, 23, 24, 25, 26, 27, 28, 29, 30, 31, 32, 33, 34, 35, 36, 37, 38, 39, or 40 contiguous nucleotides of any one of human AKT1 mRNA as set forth in SEQ ID NO:1158, 1159, or 1160, human AKT2 mRNA as set forth in SEQ ID NO:1972, or human AKT3 mRNA as set forth in SEQ ID NO:2483 or 2484.

[0095] In further embodiments, the first strand will be complementary to a second strand or a second and third strand or to a plurality of strands. The first strand and its complements will be able to form dsRNA and mdRNA molecules of this disclosure, but only about 19 to about 25 nucleotides of the first strand comprise a sequence complementary to an AKT mRNA. For example, a Dicer substrate dsRNA can have about 25 nucleotides to about 40 nucleotides, but with only 19 nucleotides of the antisense (first) strand being complementary to an AKT mRNA. In further embodiments, the first strand having complementarity to an AKT mRNA in about 19 nucleotides to about 25 nucleotides will have one, two, or three mismatches with an AKT mRNA, such as a sequence set forth in any one of SEQ ID NO:1158, 1159, 1160, 1972, 2483, or 2484, or the first strand of 19 nucleotides to about 25 nucleotides, that for example activates or is capable of loading into RISC, will have at least 80% identity with the corresponding nucleotides found in an AKT mRNA, such as the sequence set forth in any one of SEQ ID NO:1158, 1159, 1160, 1972, 2483, or 2484.

[0096] Certain illustrative dsRNA molecules, which can be used to design mdRNA molecules and can optionally include substitutions or modifications as described herein are provided in the Sequence Listings as attached herewith, which is herein incorporated by reference (text file named “07—R045PCT_Sequence_Listing,” created Feb. 27, 2008 and having a size of 1040 kilobytes). In addition, the content of Table B disclosed in U.S. Provisional Patent Application No. 60/934,930 (filed Mar. 16, 2007), which was submitted with that application as a separate text file named “Table_B_Human_RefSeq_Accession_Numbers.txt” (created Mar. 16, 2007 and having a size of 3,604 kilobytes), is incorporated herein by reference in its entirety.

Substituting and Modifying AKT dsRNA Molecules

[0097] The introduction of substituted and modified nucleotides into mdRNA and dsRNA molecules of this disclosure provides a powerful tool in overcoming potential limitations of in vivo stability and bioavailability inherent to native RNA molecules (i.e., having standard nucleotides) that are exogenously delivered. For example, the use of dsRNA molecules of this disclosure can enable a lower dose of a particular nucleic acid molecule for a given therapeutic effect (e.g., reducing or silencing AKT expression) since dsRNA molecules of this disclosure tend to have a longer half-life in serum. Furthermore, certain substitutions and modifications can improve the bioavailability of dsRNA by targeting particular cells or tissues or improving cellular uptake of the dsRNA molecules. Therefore, even if the activity of a dsRNA molecule of this disclosure is reduced as compared to a native RNA molecule, the overall activity of the substituted or modified dsRNA molecule can be greater than that of the native RNA molecule due to improved stability or delivery of the molecule. Unlike native unmodified dsRNA, substituted and modified dsRNA can also minimize the possibility of activating the interferon response in, for example, humans.

[0098] In certain embodiments, a dsRNA molecule of this disclosure has at least one uridine, at least three uridines, or each and every uridine (i.e., all uridines) of the first (antisense) strand of that is a 5-methyluridine, 2-thioribothymidine, 2′-O-methyl-5-methyluridine, or any combination thereof. In a related embodiment, the dsRNA molecule or analog thereof of this disclosure has at least one uridine, at least three uridines, or each and every uridine of the second (sense) strand of the dsRNA is a 5-methyluridine, 2-thioribothymidine, 2′-O-methyl-5-methyluridine, or any combination thereof. In a related embodiment, the dsRNA molecule of this disclosure has at least one uridine, at least three uridines, or each and every uridine of the third (sense) strand of the dsRNA is a 5-methyluridine, 2-thioribothymidine, 2′-O-methyl-5-methyluridine, or any combination thereof. In still another embodiment, the dsRNA molecule of this disclosure has at least one uridine, at least three uridines, or each and every uridine of both the first (antisense) and second (sense) strands; of both the first (antisense) and third (sense) strands; of both the second (sense) and third (sense) strands; or all of the first (antisense), second (sense) and third (sense) strands of the dsRNA are a 5-methyluridine, 2-thioribothymidine, 2′-O-methyl-5-methyluridine, or any combination thereof. In some embodiments, the double-stranded region of a dsRNA molecule has at least three 5-methyluridines, 2-thioribothymidine, 2′-O-methyl-5-methyluridine, or any combination thereof. In certain embodiments, dsRNA molecules comprise ribonucleotides at about 5% to about 95% of the nucleotide positions in one strand, both strands, or any combination thereof.

[0099] In further embodiments, a dsRNA molecule that decreases expression of an AKT gene by RNAi according to the instant disclosure further comprises one or more natural or synthetic non-standard nucleoside. In related embodiments, the non-standard nucleoside is one or more deoxyuridine, locked nucleic acid (LNA) molecule, a modified base (e.g., 5-methyluridine), a universal-binding nucleotide, a 2′-O-methyl nucleotide, a modified internucleoside linkage (e.g., phosphorothioate), a G clamp, or any combination thereof. In certain embodiments, the universal-binding nucleotide can be C-phenyl, C-naphthyl, inosine, azole carboxamide, 1-β-D-ribofuranosyl-4-nitroindole, 1-β-D-ribofuranosyl-5-nitroindole, 1-β-D-ribofuranosyl-6-nitroindole, or 1-β-D-ribofuranosyl-3-nitropyrrole.

[0100] Substituted or modified nucleotides present in dsRNA molecules, preferably in the sense or antisense strand, but also optionally in both the antisense and sense strands, comprise modified or substituted nucleotides according to this disclosure having properties or characteristics similar to natural or standard ribonucleotides. For example, this disclosure features dsRNA molecules including nucleotides having a Northern conformation (e.g., Northern pseudorotation cycle; see, e.g., Saenger, Principles of Nucleic Acid Structure, Springer-Verlag ed., 1984). As such, chemically modified nucleotides present in dsRNA molecules of this disclosure, preferably in the antisense strand, but also optionally in the sense or both the antisense and sense strands, are resistant to nuclease degradation while at the same time maintaining the capacity to mediate RNAi. Exemplary nucleotides having a Northern configuration include locked nucleic acid (LNA) nucleotides (e.g., 2′-O, 4′-C-methylene-(D-ribofuranosyl)nucleotides), 2′-methoxyethyl (MOE) nucleotides, 2′-methyl-thio-ethyl, 2′-deoxy-2′-fluoro nucleotides, 2′-deoxy-2′-chloro nucleotides, 2′-azido nucleotides, 5-methyluridines, or 2′-O-methyl nucleotides. In certain embodiments, the LNA is a 5-methyluridine LNA or 2-thio-5-methyluridine LNA. In any of these embodiments, one or more substituted or modified nucleotides can be a G clamp (e.g., a cytosine analog that forms an additional hydrogen bond to guanine, such as 9-(aminoethoxy)phenoxazine; see, e.g., Lin and Mateucci, J. Am. Chem. Soc. 120:8531, 1998).

[0101] As described herein, the first and one or more second strands of a dsRNA molecule or analog thereof provided by this disclosure can anneal or hybridize together (i.e., due to complementarity between the strands) to form at least one double-stranded region having a length of about 4 to about 10 base pairs, about 5 to about 13 base pairs, or about 15 to about 40 base pairs. In some embodiments, the dsRNA has at least one double-stranded region ranging in length from about 15 to about 24 base pairs or about 19 to about 23 base pairs. In other embodiments, the dsRNA has at least one double-stranded region ranging in length from about 26 to about 40 base pairs or about 27 to about 30 base pairs or about 30 to about 35 base pairs. In other embodiments, the two or more strands of a dsRNA molecule of this disclosure may optionally be covalently linked together by nucleotide or non-nucleotide linker molecules.

[0102] In certain embodiments, the dsRNA molecule or analog thereof comprises an overhang of one to four nucleotides on one or both 3′-ends of the dsRNA, such as an overhang comprising a deoxyribonucleotide or two deoxyribonucleotides (e.g., thymidine, adenine). In certain embodiments, the 3′-end comprising one or more deoxyribonucleotide is in an mdRNA molecule and is either in the gap, not in the gap, or any combination thereof. In some embodiments, dsRNA molecules or analogs thereof have a blunt end at one or both ends of the dsRNA. In certain embodiments, the 5′-end of the first or second strand is phosphorylated. In any of the embodiments of dsRNA molecules described herein, the 3′-terminal nucleotide overhangs can comprise ribonucleotides or deoxyribonucleotides that are chemically-modified at a nucleic acid sugar, base, or backbone. In any of the embodiments of dsRNA molecules described herein, the 3′-terminal nucleotide overhangs can comprise one or more universal base ribonucleotides. In any of the embodiments of dsRNA molecules described herein, the 3′-terminal nucleotide overhangs can comprise one or more acyclic nucleotides. In any of the embodiments of dsRNA molecules described herein, the dsRNA can further comprise a terminal phosphate group, such as a 5′-phosphate (see Martinez et al., Cell. 110:563-574, 2002; and Schwarz et al., Molec. Cell 10:537-568, 2002) or a 5′,3′-diphosphate.

[0103] As set forth herein, the terminal structure of dsRNAs of this disclosure that decrease expression of an AKT gene by, for example, RNAi may either have blunt ends or one or more overhangs. In certain embodiments, the overhang may be at the 3′-end or the 5′-end. The total length of dsRNAs having overhangs is expressed as the sum of the length of the paired double-stranded portion together with the overhanging nucleotides. For example, if a 19 base pair dsRNA has a two nucleotide overhang at both ends, the total length is expressed as 21-mer. Furthermore, since the overhanging sequence may have low specificity to an AKT gene, it is not necessarily complementary (antisense) or identical (sense) to an AKT gene sequence. In further embodiments, a dsRNA of this disclosure that decreases expression of an AKT gene by RNAi may further comprise a low molecular weight structure (e.g., a natural RNA molecule such as a tRNA, rRNA or viral RNA, or an artificial RNA molecule) at, for example, one or more overhanging portion of the dsRNA.

[0104] In further embodiments, a dsRNA molecule that decreases expression of an AKT gene by RNAi according to the instant disclosure further comprises a 2′-sugar substitution, such as 2′-deoxy, 2′-O-methyl, 2′-O-methoxyethyl, 2′-O-2-methoxyethyl, halogen, 2′-fluoro, 2′-O-allyl, or the like, or any combination thereof. In still further embodiments, a dsRNA molecule that decreases expression of an AKT gene by RNAi according to the instant disclosure further comprises a terminal cap substituent on one or both ends of the first strand or one or more second strands, such as an alkyl, abasic, deoxy abasic, glyceryl, dinucleotide, acyclic nucleotide, inverted deoxynucleotide moiety, or any combination thereof. In certain embodiments, at least one or two 5′-terminal ribonucleotides of the sense strand within the double-stranded region have a 2′-sugar substitution. In certain other embodiments, at least one or two 5′-terminal ribonucleotides of the antisense strand within the double-stranded region have a 2′-sugar substitution. In certain embodiments, at least one or two 5′-terminal ribonucleotides of the sense strand and the antisense strand within the double-stranded region have a 2′-sugar substitution.

[0105] In other embodiments, a dsRNA molecule that decreases expression of one or more target gene by RNAi according to the instant disclosure comprises one or more substitutions in the sugar backbone, including any combination of ribosyl, 2′-deoxyribosyl, a tetrofuranosyl (e.g., L-α-threofuranosyl), a hexopyranosyl (e.g., β-allopyranosyl, β-altropyranosyl, and β-glucopyranosyl), a pentopyranosyl (e.g., β-ribopyranosyl, α-lyxopyranosyl, β-xylopyranosyl, and α-arabinopyranosyl), a carbocyclic (carbon only ring) analog, a pyranose, a furanose, a morpholino, or analogs or derivatives thereof.

[0106] In yet other embodiments, a dsRNA molecule that decreases expression of an AKT gene (including a mRNA splice variant thereof) by RNAi according to the instant disclosure further comprises at least one modified internucleoside linkage, such as independently a phosphorothioate, chiral phosphorothioate, phosphorodithioate, phosphotriester, aminoalkylphosphotriester, methyl phosphonate, alkyl phosphonate, 3′-alkylene phosphonate, 5′-alkylene phosphonate, chiral phosphonate, phosphonoacetate, thiophosphonoacetate, phosphinate, phosphoramidate, 3′-amino phosphoramidate, aminoalkylphosphoramidate, thionophosphoramidate, thionoalkylphosphonate, thionoalkylphosphotriester, selenophosphate, boranophosphate linkage, or any combination thereof.

[0107] A modified internucleotide linkage, as described herein, can be present in one or more strands of a dsRNA molecule of this disclosure, for example, in the sense strand, the antisense strand, both strands, or a plurality of strands (e.g., in an mdRNA). The dsRNA molecules of this disclosure can comprise one or more modified internucleotide linkages at the 3′-end, the 5′-end, or both of the 3′- and 5′-ends of the second sense strand, the third sense strand, the antisense strand or any combination of the antisense strand and one or more of the sense strands. In one embodiment, a dsRNA molecule capable of decreasing expression of an AKT gene (including a specific or selected mRNA splice variant thereof) by RNAi has one modified internucleotide linkage at the 3′-end, such as a phosphorothioate linkage. For example, this disclosure provides a dsRNA molecule capable of decreasing expression of an AKT gene by RNAi having about 1 to about 8 or more phosphorothioate internucleotide linkages in one dsRNA strand. In yet another embodiment, this disclosure provides a dsRNA molecule capable of decreasing expression of an AKT gene by RNAi having about 1 to about 8 or more phosphorothioate internucleotide linkages in the dsRNA strands. In other embodiments, an exemplary dsRNA molecule of this disclosure can comprise from about 1 to about 5 or more consecutive phosphorothioate internucleotide linkages at the 5′-end of the sense strand, the antisense strand, both strands, or a plurality of strands. In another example, an exemplary dsRNA molecule of this disclosure can comprise one or more pyrimidine phosphorothioate internucleotide linkages in the sense strand, the antisense strand, either strand, or a plurality of strands. In yet another example, an exemplary dsRNA molecule of this disclosure comprises one or more purine phosphorothioate internucleotide linkages in the sense strand, the antisense strand, either strand, or a plurality of strands.

[0108] Many exemplary modified nucleotide bases or analogs thereof useful in the dsRNA of the instant disclosure include 5-methylcytosine; 5-hydroxymethylcytosine; xanthine; hypoxanthine; 2-aminoadenine; 6-methyl, 2-propyl, or other alkyl derivatives of adenine and guanine; 8-substituted adenines and guanines (such as 8-aza, 8-halo, 8-amino, 8-thiol, 8-thioalkyl, 8-hydroxyl, or the like); 7-methyl, 7-deaza, and 3-deaza adenines and guanines; 2-thiouracil; 2-thiothymine; 2-thiocytosine; 5-methyl, 5-propynyl, 5-halo (such as 5-bromo or 5-fluoro), 5-trifluoromethyl, or other 5-substituted uracils and cytosines; and 6-azouracil. Further useful nucleotide bases can be found in Kurreck, Eur. J. Biochem. 270:1628, 2003; Herdewijn, Antisense Nucleic Acid Develop. 10:297, 2000; Concise Encyclopedia of Polymer Science and Engineering, pages 858-859, Kroschwitz, J. I., ed. John Wiley & Sons, 1990; U.S. Pat. No. 3,687,808, and similar references.

[0109] Certain nucleotide base moieties are particularly useful for increasing the binding affinity of the dsRNA molecules of this disclosure to complementary targets. These include 5-substituted pyrimidines; 6-azapyrimidines; and N-2, N-6, or O-6 substituted purines (including 2-aminopropyladenine, 5-propynyluracil and 5-propynylcytosine). For example, 5-methyluridine and 5-methylcytosine substitutions are known to increase nucleic acid duplex stability, which can be combined with 2′-sugar modifications (such as 2′-methoxy or 2′-methoxyethyl) or internucleoside linkages (e.g., phosphorothioate) that provide nuclease resistance to the modified or substituted dsRNA.

[0110] In another aspect of the instant disclosure, there is provided a dsRNA that decreases expression of an AKT gene, comprising a first strand that is complementary to an AKT mRNA set forth in any one of SEQ ID NO:1158, 1159, 1160, 1972, 2483, or 2484, and a second strand that is complementary to the first strand, wherein the first and second strands form a double-stranded region of about 5 to about 40 base pairs; wherein at least one pyrimidine of the dsRNA is a pyrimidine nucleoside according to Formula I or II:

[chemical structure]

wherein R¹ and R² are each independently a —H, —OH, —OCH₃, —OCH₂OCH₂CH₃, —OCH₂CH₂OCH₃, halogen, substituted or unsubstituted C₁-C₁₀ alkyl, alkoxy, alkoxyalkyl, hydroxyalkyl, carboxyalkyl, alkylsulfonylamino, aminoalkyl, dialkylamino, alkylaminoalkyl, dialkylaminoalkyl, haloalkyl, trifluoromethyl, cycloalkyl, (cycloalkyl)alkyl, substituted or unsubstituted C₂-C₁₀ alkenyl, substituted or unsubstituted —O-allyl, —O—CH₂CH═CH₂, —O—CH═CHCH₃, substituted or unsubstituted C₂-C₁₀ alkynyl, carbamoyl, carbamyl, carboxy, carbonylamino, substituted or unsubstituted aryl, substituted or unsubstituted aralkyl, —NH₂, —NO₂, —C≡N, or heterocyclo group; R³ and R⁴ are each independently a hydroxyl, a protected hydroxyl, or an internucleoside linking group; and R⁵ and R⁸ are each independently O or S. In certain embodiments, at least one nucleoside is according to Formula I in which R¹ is methyl and R² is —OH, or R¹ is methyl, R² is —OH, and R⁸ is S. In other embodiments, the internucleoside linking group covalently links from about 5 to about 40 nucleosides.

[0111] In certain embodiments, the first and one or more second strands of a dsRNA, which decreases expression of an AKT gene by RNAi and has at least one pyrimidine substituted with a pyrimidine nucleoside according to Formula I or II, can anneal or hybridize together (i.e., due to complementarity between the strands) to form at least one double-stranded region having a length or a combined length of about 15 to about 40 base pairs. In some embodiments, the dsRNA has at least one double-stranded region ranging in length from about 4 base pairs to about 10 base pairs or about 5 to about 13 base pairs or about 15 to about 25 base pairs or about 19 to about 23 base pairs. In other embodiments, the dsRNA has at least one double-stranded region ranging in length from about 26 to about 40 base pairs or about 27 to about 30 base pairs or about 30 to about 35 base pairs. In certain embodiments, the dsRNA molecule or analog thereof has an overhang of one to four nucleotides on one or both 3′-ends, such as an overhang comprising a deoxyribonucleotide or two deoxyribonucleotides (e.g., thymidine). In some embodiments, dsRNA molecule or analog thereof has a blunt end at one or both ends of the dsRNA. In certain embodiments, the 5′-end of the first or second strand is phosphorylated.

[0112] In certain embodiments, at least one R¹ is a C₁-C₅ alkyl, such as methyl or ethyl. Within other exemplary embodiments of this disclosure, compounds of Formula I are a 5-alkyluridine (i.e., R¹ is alkyl, R² is —OH, and R³, R⁴, and R⁵ are as defined herein) or compounds of Formula II are a 5-alkylcytidine (i.e., R¹ is alkyl, R² is —OH, and R³, R⁴, and R⁵ are as defined herein). In related embodiments, the 5-alkyluridine is a 5-methyluridine (also referred to as ribothymidine or T^{r}—i.e., R¹ is methyl and R² is —OH), and the 5-alkylcytidine is a 5-methylcytidine. In other embodiments, at least one, at least three, or all uridines of the first strand of the dsRNA are replaced with 5-methyluridine, or at least one, at least three, or all uridines of the second strand of the dsRNA are replaced with 5-methyluridine, or any combination thereof (e.g., such changes are made on more than one strand). In certain embodiments, at least one pyrimidine nucleoside of Formula I or Formula II has an R⁵ that is S or R⁸ that is S.

[0113] In further embodiments, at least one pyrimidine nucleoside of the dsRNA is a locked nucleic acid (LNA) in the form of a bicyclic sugar, wherein R² is oxygen, and the 2′-O and 4′-C form an oxymethylene bridge on the same ribose ring. In a related embodiment, the LNA comprises a base substitution, such as a 5-methyluridine LNA or 2-thio-5-methyluridine LNA. In other embodiments, at least one, at least three, or all uridines of the first strand of the dsRNA are replaced with 5-methyluridine or 2-thioribothymidine or 5-methyluridine LNA or 2-thio-5-methyluridine LNA, or at least one, at least three, or all uridines of the second strand of the dsRNA are replaced with 5-methyluridine, 2-thioribothymidine, 5-methyluridine LNA, 2-thio-5-methyluridine LNA, or any combination thereof (e.g., such changes are made on both strands, or some substitutions include 5-methyluridine only, 2-thioribothymidine only, 5-methyluridine LNA only, 2-thio-5-methyluridine LNA only, or one or more 5-methyluridine or 2-thioribothymidine with one or more 5-methyluridine LNA or 2-thio-5-methyluridine LNA).

[0114] In further embodiments, a ribose of the pyrimidine nucleoside or the internucleoside linkage can be optionally modified. For example, compounds of Formula I or II are provided wherein R² is alkoxy, such as a 2′-O-methyl substitution (e.g., which may be in addition to a 5-alkyluridine or a 5-alkylcytidine, respectively). In certain embodiments, R² is selected from 2′-O—(C₁-C₅)alkyl, 2′-O-methyl, 2′-OCH₂OCH₂CH₃, 2′-OCH₂CH₂OCH₃, 2′-O-allyl, or 2′-fluoro. In further embodiments, one or more of the pyrimidine nucleosides are according to Formula I in which R¹ is methyl and R² is a 2′-O—(C₁-C₅)alkyl (e.g., 2′-O-methyl), or in which R¹ is methyl, R² is a 2′O—(C₁-C₅)alkyl (e.g., 2′O-methyl), and R² is S, or any combination thereof. In other embodiments, one or more, or at least two, pyrimidine nucleosides according to Formula I or II have an R² that is not —H or —OH and is incorporated at a 3′-end or 5′-end and not within the gap of one or more strands within the double-stranded region of the dsRNA molecule.

[0115] In further embodiments, a dsRNA molecule or analog thereof comprising a pyrimidine nucleoside according to Formula I or Formula II in which R² is not —H or —OH and an overhang, further comprises at least two of pyrimidine nucleosides that are incorporated either at a 3′-end or a 5′-end or both of one strand or two strands within the double-stranded region of the dsRNA molecule. In a related embodiment, at least one of the at least two pyrimidine nucleosides in which R² is not —H or —OH is located at a 3′-end or a 5′-end within the double-stranded region of at least one strand of the dsRNA molecule, and wherein at least one of the at least two pyrimidine nucleosides in which R² is not —H or —OH is located internally within a strand of the dsRNA molecule. In still further embodiments, a dsRNA molecule or analog thereof that has an overhang has a first of the two or more pyrimidine nucleosides in which R² is not —H or —OH that is incorporated at a 5′-end within the double-stranded region of the sense strand of the dsRNA molecule and a second of the two or more pyrimidine nucleosides is incorporated at a 5′-end within the double-stranded region of the antisense strand of the dsRNA molecule. In any of these embodiments, one or more substituted or modified nucleotides can be a G clamp (e.g., a cytosine analog that forms an additional hydrogen bond to guanine, such as 9-(aminoethoxy)phenoxazine; see, e.g., Lin and Mateucci, 1998). In any of these embodiments, provided the one or more modified pyrimidine nucleosides are not within the gap.

[0116] In yet other embodiments, a dsRNA molecule or analog thereof of Formula I or II according to the instant disclosure that has an overhang that comprises four or more independent pyrimidine nucleosides or four or more independent pyrimidine nucleosides in which R² is not —H or —OH, wherein (a) a first pyrimidine nucleoside is incorporated into a 3′-end within the double-stranded region of the sense (second) strand of the dsRNA, (b) a second pyrimidine nucleoside is incorporated into a 5′-end within the double-stranded region of the sense (second) strand, (c) a third pyrimidine nucleoside is incorporated into a 3′-end within the double-stranded region of the antisense (first) strand of the dsRNA, and (d) a fourth pyrimidine nucleoside is incorporated into a 5′-end within the double-stranded region of the antisense (first) strand. In any of these embodiments, provided the one or more modified pyrimidine nucleosides are not within the gap.

[0117] In further embodiments, a dsRNA molecule or analog thereof comprising a pyrimidine nucleoside according to Formula I or Formula II in which R is not —H or —OH and is blunt-ended, further comprises at least two of pyrimidine nucleosides that are incorporated either at a 3′-end or a 5′-end or both of one strand or two strands of the dsRNA molecule. In a related embodiment, at least one of the at least two pyrimidine nucleosides in which R² is not —H or —OH is located at a 3′-end or a 5′-end of at least one strand of the dsRNA molecule, and wherein at least one of the at least two pyrimidine nucleosides in which R² is not —H or —OH is located internally within a strand of the dsRNA molecule. In still further embodiments, a dsRNA molecule or analog thereof that is blunt-ended has a first of the two or more pyrimidine nucleosides in which R² is not —H or —OH that is incorporated at a 5′-end of the sense strand of the dsRNA molecule and a second of the two or more pyrimidine nucleosides is incorporated at a 5′-end of the antisense strand of the dsRNA molecule. In any of these embodiments, provided the one or more modified pyrimidine nucleosides are not within the gap.

[0118] In yet other embodiments, a dsRNA molecule comprising a pyrimidine nucleoside according to Formula I or Formula II and that is blunt-ended comprises four or more independent pyrimidine nucleosides or four or more independent pyrimidine nucleosides in which R² is not —H or —OH, wherein (a) a first pyrimidine nucleoside is incorporated into a 3′-end within the double-stranded region of the sense (second) strand of the dsRNA, (b) a second pyrimidine nucleoside is incorporated into a 5′-end within the double-stranded region of the sense (second) strand, (c) a third pyrimidine nucleoside is incorporated into a 3′-end within the double-stranded region of the antisense (first) strand of the dsRNA, and (d) a fourth pyrimidine nucleoside is incorporated into a 5′-end within the double-stranded region of the antisense (first) strand. In any of these embodiments, provided the one or more modified pyrimidine nucleosides are not within the gap.

[0119] In still further embodiments, a dsRNA molecule or analog thereof of Formula I or II according to the instant disclosure further comprises a terminal cap substituent on one or both ends of the first strand or second strand, such as an alkyl, abasic, deoxy abasic, glyceryl, dinucleotide, acyclic nucleotide, inverted deoxynucleotide moiety, or any combination thereof. In further embodiments, one or more internucleoside linkage can be optionally modified. For example, a dsRNA molecule or analog thereof of Formula I or II according to the instant disclosure wherein at least one internucleoside linkage is modified to a phosphorothioate, chiral phosphorothioate, phosphorodithioate, phosphotriester, aminoalkylphosphotriester, methyl phosphonate, alkyl phosphonate, 3′-alkylene phosphonate, 5′-alkylene phosphonate, chiral phosphonate, phosphonoacetate, thiophosphonoacetate, phosphinate, phosphoramidate, 3′-amino phosphoramidate, aminoalkylphosphoramidate, selenophosphate, thionophosphoramidate, thionoalkylphosphonate, thionoalkylphosphotriester, boranophosphate linkage, or any combination thereof.

[0120] In still another embodiment, a nicked or gapped dsRNA molecule (ndsRNA or gdsRNA, respectively) that decreases expression of an AKT gene by RNAi, comprising a first strand that is complementary to an AKT mRNA set forth in any one of SEQ ID NO:1158, 1159, 1160, 1972, 2483, or 2484, and two or more second strands that are complementary to the first strand, wherein the first and at least one of the second strands form a non-overlapping double-stranded region of about 5 to about 13 base pairs. Any of the substitutions or modifications described herein is contemplated within this embodiment as well.

[0121] In another exemplary of this disclosure, the dsRNAs comprise at least two or more substituted pyrimidine nucleosides can each be independently selected wherein R¹ comprises any chemical modification or substitution as contemplated herein, for example an alkyl (e.g., methyl), halogen, hydroxy, alkoxy, nitro, amino, trifluoromethyl, cycloalkyl, (cycloalkyl)alkyl, alkanoyl, alkanoyloxy, aryl, aroyl, aralkyl, nitrile, dialkylamino, alkenyl, alkynyl, hydroxyalkyl, aminoalkyl, alkylaminoalkyl, dialkylaminoalkyl, haloalkyl, carboxyalkyl, alkoxyalkyl, carboxy, carbonyl, alkanoylamino, carbamoyl, carbonylamino, alkylsulfonylamino, or heterocyclo group. When two or more modified ribonucleotides are present, each modified ribonucleotide can be independently modified to have the same, or different, modification or substitution at R¹ or R².

[0122] In other detailed embodiments, one or more substituted pyrimidine nucleosides according to Formula I or II can be located at any ribonucleotide position, or any combination of ribonucleotide positions, on either or both of the sense and antisense strands of a dsRNA molecule of this disclosure, including at one or more multiple terminal positions as noted above, or at any one or combination of multiple non-terminal (“internal”) positions. In this regard, each of the sense and antisense strands can incorporate about 1 to about 6 or more of the substituted pyrimidine nucleosides.

[0123] In certain embodiments, when two or more substituted pyrimidine nucleosides are incorporated within a dsRNA of this disclosure, at least one of the substituted pyrimidine nucleosides will be at a 3′- or 5′-end of one or both strands, and in certain embodiments at least one of the substituted pyrimidine nucleosides will be at a 5′-end of one or both strands. In other embodiments, the substituted pyrimidine nucleosides are located at a position corresponding to a position of a pyrimidine in an unmodified dsRNA that is constructed as a homologous sequence for targeting a cognate mRNA, as described herein.

[0124] In addition, the terminal structure of the dsRNAs of this disclosure may have a stem-loop structure in which ends of one side of the dsRNA molecule are connected by a linker nucleic acid, e.g., a linker RNA. The length of the double-stranded region (stem-loop portion) can be, for example, about 15 to about 49 bp, about 15 to about 35 bp, or about 21 to about 30 bp long. Alternatively, the length of the double-stranded region that is a final transcription product of dsRNAs to be expressed in a target cell may be, for example, approximately about 15 to about 49 bp, about 15 to about 35 bp, or about 21 to about 30 bp long. When linker segments are employed, there is no particular limitation in the length of the linker as long as it does not hinder pairing of the stem portion. For example, for stable pairing of the stem portion and suppression of recombination between DNAs coding for this portion, the linker portion may have a clover-leaf tRNA structure. Even if the linker has a length that would hinder pairing of the stem portion, it is possible, for example, to construct the linker portion to include introns so that the introns are excised during processing of a precursor RNA into mature RNA, thereby allowing pairing of the stem portion. In the case of a stem-loop dsRNA, either end (head or tail) of RNA with no loop structure may have a low molecular weight RNA. As described above, these low molecular weight RNAs may include a natural RNA molecule, such as tRNA, rRNA or viral RNA, or an artificial RNA molecule.

[0125] A dsRNA molecule may be comprised of a circular nucleic acid molecule, wherein the dsRNA is about 38 to about 70 nucleotides in length having from about 18 to about 23 base pairs (e.g., about 19 to about 21 bp) wherein the circular oligonucleotide forms a dumbbell shaped structure having about 19 base pairs and two loops. In certain embodiments, a circular dsRNA molecule contains two loop motifs wherein one or both loop portions of the dsRNA molecule is biodegradable. For example, a circular dsRNA molecule of this disclosure is designed such that degradation of the loop portions of the dsRNA molecule in vivo can generate a dsRNA molecule with 3′-terminal overhangs, such as 3′-terminal nucleotide overhangs comprising from about 1 to about 4 (unpaired) nucleotides.

[0126] Substituting or modifying nucleosides of a dsRNA according to this disclosure can result in increased resistance to enzymatic degradation, such as exonucleolytic degradation, including 5′-exonucleolytic or 3′-exonucleolytic degradation. As such, in some embodiments, the dsRNAs described herein will exhibit significant resistance to enzymatic degradation compared to a corresponding dsRNA having standard nucleotides, and will thereby possess greater stability, increased half-life, and greater bioavailability in physiological environments (e.g., when introduced into a eukaryotic target cell). In addition to increasing resistance of the substituted or modified dsRNAs to exonucleolytic degradation, the incorporation of one or more pyrimidine nucleosides according to Formula I or II will render dsRNAs more resistant to other enzymatic or chemical degradation processes and thus more stable and bioavailable than otherwise identical dsRNAs that do not include the substitutions or modifications. In related aspects of this disclosure, dsRNA substitutions or modifications described herein will often improve stability of a modified dsRNA for use within research, diagnostic and treatment methods wherein the modified dsRNA is contacted with a biological sample, for example, a mammalian cell, intracellular compartment, serum or other extracellular fluid, tissue, or other in vitro or in vivo physiological compartment or environment. In one embodiment, diagnosis is performed on an isolated biological sample. In another embodiment, the diagnostic method is performed in vitro. In a further embodiment, the diagnostic method is not performed (directly) on a human or animal body.

[0127] In addition to increasing stability of substituted or modified dsRNAs, incorporation of one or more pyrimidine nucleosides according to Formula I or II in a dsRNA designed for gene silencing can provide additional desired functional results, including increasing a melting point of a substituted or modified dsRNA compared to a corresponding unmodified dsRNA.

[0128] In another aspect of this disclosure, certain substitutions or modifications of dsRNAs described herein can reduce “off-target effects” of the substituted or modified dsRNA molecules when they are contacted with a biological sample (e.g., when introduced into a target eukaryotic cell having specific, and non-specific mRNA species present as potential specific and non-specific targets). In yet another aspect of this disclosure, the dsRNA substitutions or modifications described herein can reduce interferon activation by the dsRNA molecule when the dsRNA is contacted with a biological sample, e.g., when introduced into a eukaryotic cell.

[0129] In further embodiments, dsRNAs of this disclosure can comprise one or more sense (second) strand that is homologous or corresponds to a sequence of a target gene (e.g., an AKT) and an antisense (first) strand that is complementary to the sense strand and a sequence of the target gene (e.g., an AKT). In exemplary embodiments, at least one strand of the dsRNA incorporates one or more pyrimidines substituted according to Formula I or II (e.g., wherein the pyrimidine is 5-methyluridine, 2-thioribothymidine, or 2-O-methyl-5-methyluridine, the ribose is modified to incorporate one or more 2′-O-methyl substitutions, or any combination thereof). These and other multiple substitutions or modifications according to Formula I or II can be introduced into one or more pyrimidines, or into any combination and up to all pyrimidines present in one or more strands of a dsRNA of the instant disclosure, so long as the dsRNA has or retains RNAi activity similar to or better than the activity of an unmodified dsRNA. In one embodiment, the dsRNA comprises one or more 2′O-methyl-5-methyluridine.

[0130] In any of the embodiments described herein, the dsRNA may include multiple modifications. For example, a dsRNA having at least one ribothymidine or 2′-O-methyl-5-methyluridine may further comprise at least one LNA, 2′-methoxy, 2′-fluoro, 2′-deoxy, phosphorothioate linkage, an inverted base terminal cap, or any combination thereof. In certain embodiments, a dsRNA will have from one to all ribothymidines and have up to 75% LNA. In other embodiments, a dsRNA will have from one to all ribothymidines and have up to 75% 2′-methoxy (e.g., not at the Argonaute cleavage site). In still other embodiments, a dsRNA will have from one to all ribothymidines and have up to 100% 2′-fluoro. In further embodiments, a dsRNA will have from one to all ribothymidines and have up to 75% 2′-deoxy. In further embodiments, a dsRNA will have up to 75% LNA and have up to 75% 2′-methoxy. In still other embodiments, a dsRNA will have up to 75% LNA and have up to 100% 2′-fluoro. In further embodiments, a dsRNA will have up to 75% LNA and have up to 75% 2′-deoxy. In other embodiments, a dsRNA will have up to 75% 2′-methoxy and have up to 100% 2′-fluoro. In more embodiments, a dsRNA will have up to 75% 2′-methoxy and have up to 75% 2′-deoxy. In further embodiments, a dsRNA will have up to 100% 2′-fluoro and have up to 75% 2′-deoxy.

[0131] In further multiple modification embodiments, a dsRNA will have from one to all ribothymidines, up to 75% LNA, and up to 75% 2′-methoxy. In still further embodiments, a dsRNA will have from one to all ribothymidines, up to 75% LNA, and up to 100% 2′-fluoro. In further embodiments, a dsRNA will have from one to all ribothymidines, up to 75% LNA, and up to about 75% 2′-deoxy. In further embodiments, a dsRNA will have from one to all ribothymidines, up to 75% 2′-methoxy, and up to 75% 2′-fluoro. In further embodiments, a dsRNA will have from one to all ribothymidines, up to 75% 2′-methoxy, and up to 75% 2′-deoxy. In further embodiments, a dsRNA will have from one to all ribothymidines, up to 100% 2′-fluoro, and up to 75% 2′-deoxy. In yet further embodiments, a dsRNA will have from one to all ribothymidines, up to 75% LNA substitutions, up to 75% 2′-methoxy, up to 100% 2′-fluoro, and up to 75% 2′-deoxy. In other embodiments, a dsRNA will have up to 75% LNA, up to 75% 2′-methoxy, and up to 100% 2′-fluoro. In further embodiments, a dsRNA will have up to 75% LNA, up to 75% 2′-methoxy, and up to about 75% 2′-deoxy. In further embodiments, a dsRNA will have up to 75% LNA, up to 100% 2′-fluoro, and up to 75% 2′-deoxy. In still further embodiments, a dsRNA will have up to 75% 2′-methoxy, up to 100% 2′-fluoro, and up to 75% 2′-deoxy.

[0132] In any of these exemplary methods for using multiply modified dsRNA, the dsRNA may further comprise up to 100% phosphorothioate internucleoside linkages, from one to ten or more inverted base terminal caps, or any combination thereof. Additionally, any of these dsRNA may have these multiple modifications on one strand, two strands, three strands, a plurality of strands, or all strands, or on the same or different nucleoside within a dsRNA molecule. Finally, in any of these multiple modification dsRNA, the dsRNA must have gene silencing activity.

[0133] Within certain aspects, the present disclosure provides dsRNA that decreases expression of an AKT gene by RNAi (e.g., an AKT of any one of SEQ ID NOS:1158-1160, 1972, 2483 or 2484), and compositions comprising one or more dsRNA, wherein at least one dsRNA comprises one or more universal-binding nucleotide(s) in the first, second or third position in the anti-codon of the antisense or sense strand of the dsRNA and wherein the dsRNA is capable of specifically binding to an AKT sequence, such as an RNA expressed by a target cell. In cases wherein the sequence of a target AKT RNA includes one or more single nucleotide substitutions, dsRNA comprising a universal-binding nucleotide retains its capacity to specifically bind a target AKT RNA, thereby mediating gene silencing and, as a consequence, overcoming escape of the target AKT from dsRNA-mediated gene silencing. Exemplary universal-binding nucleotides that may be suitably employed in the compositions and methods disclosed herein include inosine, 1-β-D-ribofuranosyl-5-nitroindole, or 1-β-D-ribofuranosyl-3-nitropyrrole.

[0134] In certain aspects, dsRNA disclosed herein can include between about 1 universal-binding nucleotide and about 10 universal-binding nucleotides. Within other aspects, the presently disclosed dsRNA may comprise a sense strand that is homologous to a sequence of an AKT gene and an antisense strand that is complementary to the sense strand, with the proviso that at least one nucleotide of the antisense or sense strand of the otherwise complementary dsRNA duplex has one or more universal-binding nucleotide.

### Synthesis of Nucleic Acid Molecules

[0135] Exemplary molecules of the instant disclosure are recombinantly produced, chemically synthesized, or a combination thereof. Oligonucleotides (e.g., certain modified oligonucleotides or portions of oligonucleotides lacking ribonucleotides) are synthesized using protocols known in the art, for example as described in Caruthers et al., Methods in Enzymol. 211:3-19, 1992; Thompson et al., PCT Publication No. WO 99/54459, Wincott et al., Nucleic Acids Res. 23:2677-2684, 1995; Wincott et al., Methods Mol. Bio. 74:59, 1997; Brennan et al., Biotechnol Bioeng. 61:33-45, 1998; and Brennan, U.S. Pat. No. 6,001,311. Synthesis of RNA, including certain dsRNA molecules and analogs thereof of this disclosure, can be made using the procedure as described in Usman et al., J. Am. Chem. Soc. 109:7845, 1987; Scaringe et al., Nucleic Acids Res. 18:5433, 1990; and Wincott et al., Nucleic Acids Res. 23:2677-2684, 1995; Wincott et al., Methods Mol. Bio. 74:59, 1997.

[0136] In certain embodiments, the nucleic acid molecules of the present disclosure can be synthesized separately and joined together post-synthetically, for example, by ligation (Moore et al., Science 256:9923, 1992; Draper et al., PCT Publication No. WO 93/23569; Shabarova et al., Nucleic Acids Res. 19:4247, 1991; Bellon et al., Nucleosides & Nucleotides 16:951, 1997; Bellon et al., Bioconjugate Chem. 8:204, 1997), or by hybridization following synthesis or deprotection.

[0137] In further embodiments, dsRNAs of this disclosure that decrease expression of an AKT gene by RNAi can be made as single or multiple transcription products expressed by a polynucleotide vector encoding one or more dsRNAs and directing their expression within host cells. In these embodiments the double-stranded portion of a final transcription product of the dsRNAs to be expressed within the target cell can be, for example, about 5 to about 40 bp, about 15 to about 24 bp, or about 25 to about 40 bp long. Within exemplary embodiments, double-stranded portions of dsRNAs, in which two or more strands pair up, are not limited to completely paired nucleotide segments, and may contain non-pairing portions due to a mismatch (the corresponding nucleotides are not complementary), bulge (lacking in the corresponding complementary nucleotide on one strand), overhang, or the like. Non-pairing portions can be contained to the extent that they do not interfere with dsRNA formation and function. In certain embodiments, a “bulge” may comprise 1 to 2 non-pairing nucleotides, and the double-stranded region of dsRNAs in which two strands pair up may contain from about 1 to 7, or about 1 to 5 bulges. In addition, “mismatch” portions contained in the double-stranded region of dsRNAs may include from about 1 to 7, or about 1 to 5 mismatches. In other embodiments, the double-stranded region of dsRNAs of this disclosure may contain both bulge and mismatched portions in the approximate numerical ranges specified herein.

[0138] A dsRNA or analog thereof of this disclosure may be further comprised of a nucleotide, non-nucleotide, or mixed nucleotide/non-nucleotide linker that joins the sense region of the dsRNA to the antisense region of the dsRNA. In one embodiment, a nucleotide linker can be a linker of more than about 2 nucleotides length up to about 10 nucleotides in length. In another embodiment, the nucleotide linker can be a nucleic acid aptamer. By “aptamer” or “nucleic acid aptamer” as used herein is meant a nucleic acid molecule that binds specifically to a target molecule wherein the nucleic acid molecule has sequence that comprises a sequence recognized by the target molecule in its natural setting. Alternately, an aptamer can be a nucleic acid molecule that binds to a target molecule wherein the target molecule does not naturally bind to a nucleic acid. The target molecule can be any molecule of interest. For example, the aptamer can be used to bind to a ligand-binding domain of a protein, thereby preventing interaction of the naturally occurring ligand with the protein. This is a non-limiting example and those in the art will recognize that other embodiments can be readily generated using techniques generally known in the art (see, e.g., Gold et al., Annu. Rev. Biochem. 64:763, 1995; Brody and Gold, J. Biotechnol. 74:5, 2000; Sun, Curr. Opin. Mol. Ther. 2:100, 2000; Kusser, J. Biotechnol. 74:27, 2000; Hermann and Patel, Science 287:820, 2000; and Jayasena, Clinical Chem. 45:1628, 1999).

[0139] A non-nucleotide linker may be comprised of an abasic nucleotide, polyether, polyamine, polyamide, peptide, carbohydrate, lipid, polyhydrocarbon, or other polymeric compounds (e.g., polyethylene glycols such as those having between 2 and 100 ethylene glycol units). Specific examples include those described by Seela and Kaiser, Nucleic Acids Res. 18:6353, 1990, and Nucleic Acids Res. 15:3113, 1987; Cload and Schepartz, J. Am. Chem. Soc. 113:6324, 1991; Richardson and Schepartz, J. Am. Chem. Soc. 113:5109, 1991; Ma et al., Nucleic Acids Res. 21:2585, 1993, and Biochemistry 32:1751, 1993; Durand et al., Nucleic Acids Res. 18:6353, 1990; McCurdy et al., Nucleosides & Nucleotides 10:287, 1991; Jaschke et al., Tetrahedron Lett. 34:301, 1993; Ono et al., Biochemistry 30:9914, 1991; Arnold et al., PCT Publication No. WO 89/02439; Usman et al., PCT Publication No. WO 95/06731; Dudycz et al., PCT Publication No. WO 95/11910 and Ferentz and Verdine, J. Am. Chem. Soc. 113:4000, 1991. The synthesis of a dsRNA molecule of this disclosure, which can be further modified, comprises: (a) synthesis of a first (antisense) strand and synthesis of a second (sense) strand and a third (sense) strand that are each complementary to non-overlapping regions of the first strand; and (b) annealing the first, second and third strands together under conditions suitable to obtain a dsRNA molecule. In another embodiment, synthesis of the first, second and third strands of a dsRNA molecule is by solid phase oligonucleotide synthesis. In yet another embodiment, synthesis of the first, second, and third strands of a dsRNA molecule is by solid phase tandem oligonucleotide synthesis.

[0140] Chemically synthesizing nucleic acid molecules with substitutions or modifications (base, sugar, phosphate, or any combination thereof) can prevent their degradation by serum ribonucleases, which may lead to increased potency. See, e.g., Eckstein et al., PCT Publication No. WO 92/07065; Perrault et al., Nature 344:565, 1990; Pieken et al., Science 253:314, 1991; Usman and Cedergren, Trends in Biochem. Sci. 17:334, 1992; Usman et al., Nucleic Acids Symp. Ser. 31:163, 1994; Beigelman et al., J. Biol. Chem. 270:25702, 1995; Burgin et al., Biochemistry 35:14090, 1996; Burlina et al., Bioorg. Med. Chem. 5:1999, 1997; Thompson et al., Karpeisky et al., Tetrahedron Lett. 39:1131, 1998; Earnshaw and Gait, Biopolymers (Nucleic Acid Sciences) 48:39-55, 1998; Verma and Eckstein, Annu. Rev. Biochem. 67:99, 1998; Herdewijn, Antisense Nucleic Acid Drug Dev. 10:297, 2000; Kurreck, Eur. J. Biochem. 270:1628, 2003; Dorsett and Tuschl, Nature Rev. Drug Discov. 3:318, 2004; PCT Publication Nos. WO 91/03162; WO 93/15187; WO 97/26270; WO 98/13526; U.S. Pat. Nos. 5,334,711; 5,627,053; 5,716,824; 5,767,264; 6,300,074. Each of the above references discloses various substitutions and chemical modifications to the base, phosphate, or sugar moieties of nucleic acid molecules, which can be used in the dsRNAs described herein. For example, oligonucleotides can be modified at the sugar moiety to enhance stability or prolong biological activity by increasing nuclease resistance. Representative sugar modifications include 2′-amino, 2′-C-allyl, 2′-fluoro, 2′-O-methyl, 2′-O-allyl, or 2′-H. Other modifications to enhance stability or prolong biological activity can be internucleoside linkages, such as phosphorothioate, or base-modifications, such as locked nucleic acids (see, e.g., U.S. Pat. Nos. 6,670,461; 6,794,499; 6,268,490), or 5-methyluridine or 2′-O-methyl-5-methyluridine in place of uridine (see, e.g., U.S. Patent Application Publication No. 2006/0142230). Hence, dsRNA molecules of the instant disclosure can be modified to increase nuclease resistance or duplex stability while substantially retaining or having enhanced RNAi activity as compared to unmodified dsRNA.

[0141] In one embodiment, this disclosure features substituted or modified dsRNA molecules, such as phosphate backbone modifications comprising one or more phosphorothioate, phosphorodithioate, methylphosphonate, phosphotriester, morpholino, amidate carbamate, carboxymethyl, acetamidate, polyamide, sulfonate, sulfonamide, sulfamate, formacetal, thioformacetal, or alkylsilyl substitutions. For a review of oligonucleotide backbone modifications, see Hunziker and Leumann, Nucleic Acid Analogues: Synthesis and Properties, in Modern Synthetic Methods, VCH, 331-417, 1995; and Mesmaeker et al., ACS, 24-39, 1994.

[0142] In another embodiment, a conjugate molecule can be optionally attached to a dsRNA or analog thereof that decreases expression of an AKT gene by RNAi. For example, such conjugate molecules may be polyethylene glycol, human serum albumin, polyarginine, Gln-Asn polymer, or a ligand for a cellular receptor that can, for example, mediate cellular uptake (e.g., HIV TAT, see Vocero-Akbani et al., Nature Med. 5:23, 1999; see also U.S. Patent Application Publication No. 2004/0132161). Examples of specific conjugate molecules contemplated by the instant disclosure that can be attached to a dsRNA or analog thereof of this disclosure are described in Vargeese et al., U.S. Patent Application Publication No. 2003/0130186, and U.S. Patent Application Publication No. 2004/0110296. In another embodiment, a conjugate molecule is covalently attached to a dsRNA or analog thereof that decreases expression of an AKT gene by RNAi via a biodegradable linker. In certain embodiments, a conjugate molecule can be attached at the 3′-end of either the sense strand, the antisense strand, or both strands of a dsRNA molecule provided herein. In another embodiment, a conjugate molecule can be attached at the 5′-end of either the sense strand, the antisense strand, or both strands of the dsRNA or analog thereof. In yet another embodiment, a conjugate molecule is attached at both the 3′-end and 5′-end of either the sense strand, the antisense strand, or both strands of a dsRNA molecule, or any combination thereof. In further embodiments, a conjugate molecule of this disclosure comprises a molecule that facilitates delivery of a dsRNA or analog thereof into a biological system, such as a cell. A person of skill in the art can screen dsRNA of this disclosure having various conjugates to determine whether the dsRNA-conjugate possesses improved properties (e.g., pharmacokinetic profiles, bioavailability, stability) while maintaining the ability to mediate RNAi in, for example, an animal model as described herein or generally known in the art. Methods for Selecting dsRNA Molecules Specific for an AKT

[0143] As indicated herein, the present disclosure also provides methods for selecting dsRNA and analogs thereof that are capable of specifically binding to an AKT gene (including a mRNA splice variant thereof) while being incapable of specifically binding or minimally binding to non-AKT genes. The selection process disclosed herein is useful, for example, in eliminating dsRNAs analogs that are cytotoxic due to non-specific binding to, and subsequent degradation of, one or more non-AKT genes.

[0144] Methods of the present disclosure do not require a priori knowledge of the nucleotide sequence of every possible gene variant (including mRNA splice variants) targeted by the dsRNA or analog thereof. In one embodiment, the nucleotide sequence of the dsRNA is selected from a conserved region or consensus sequence of an AKT gene. In another embodiment, the nucleotide sequence of the dsRNA may be selectively or preferentially targeted to a certain sequence contained in an mRNA splice variant of an AKT gene.

[0145] In certain embodiments, methods are provided for selecting one or more dsRNA molecule that decreases expression of an AKT gene by RNAi, comprising a first strand that is complementary to an AKT mRNA set forth in any one of SEQ ID NO:1158, 1159, 1160, 1972, 2483, or 2484, and a second strand that is complementary to the first strand, wherein the first and second strands form a double-stranded region of about 15 to about 40 base pairs (see, e.g., AKT sequences in the Sequence Listing identified herein), and wherein at least one uridine of the dsRNA molecule is replaced with a 5-methyluridine or 2-thioribothymidine or 2′-O-methyl-5-methyluridine, which methods employ “off-target” profiling whereby one or more dsRNA provided herein is contacted with a cell, either in vivo or in vitro, and total mRNA is collected for use in probing a microarray comprising oligonucleotides having one or more nucleotide sequence from a panel of known genes, including non-AKT genes (e.g., interferon). Within related embodiments, one or more dsRNA molecule that decreases expression of an AKT gene by RNAi may further comprise a third strand that is complementary to the first strand, wherein the first and third strands form a double-stranded region wherein the double-stranded region formed by the first and third strands is non-overlapping with a double-stranded region formed by the first and second strands. The “off-target” profile of the dsRNA provided herein is quantified by determining the number of non-AKT genes having reduced expression levels in the presence of the candidate dsRNAs. The existence of “off target” binding indicates a dsRNA is capable of specifically binding to one or more non-AKT gene messages. In certain embodiments, a dsRNA as provided herein (see, e.g., sequences in the Sequence Listing identified herein) applicable to therapeutic use will exhibit a greater stability, minimal interferon response, and little or no “off-target” binding.

[0146] Still further embodiments provide methods for selecting more efficacious dsRNA by using one or more reporter gene constructs comprising a constitutive promoter, such as a cytomegalovirus (CMV) or phosphoglycerate kinase (PGK) promoter, operably fused to, and capable of altering the expression of one or more reporter genes, such as a luciferase, chloramphenicol (CAT), or β-galactosidase, which, in turn, is operably fused in-frame with a dsRNA (such as one having a length between about 15 base-pairs and about 40 base-pairs or from about 5 nucleotides to about 24 nucleotides, or about 25 nucleotides to about 40 nucleotides) that contains an AKT sequence, as provided herein.

[0147] Individual reporter gene expression constructs may be co-transfected with one or more dsRNA or analog thereof. The capacity of a given dsRNA to reduce the expression level of AKT may be determined by comparing the measured reporter gene activity in cells transfected with or without a dsRNA molecule of interest.

[0148] Certain embodiments disclosed herein provide methods for selecting one or more modified dsRNA molecule(s) that employ the step of predicting the stability of a dsRNA duplex. In some embodiments, such a prediction is achieved by employing a theoretical melting curve wherein a higher theoretical melting curve indicates an increase in dsRNA duplex stability and a concomitant decrease in cytotoxic effects. Alternatively, stability of a dsRNA duplex may be determined empirically by measuring the hybridization of a single RNA analog strand as described herein to a complementary target gene within, for example, a polynucleotide array. The melting temperature (i.e., the Tₘ value) for each modified RNA and complementary RNA immobilized on the array can be determined and, from this Tₘ value, the relative stability of the modified RNA pairing with a complementary RNA molecule determined.

[0149] For example, Kawase et al. (Nucleic Acids Res. 14:7727, 1986) have described an analysis of the nucleotide-pairing properties of Di (inosine) to A, C, G, and T, which was achieved by measuring the hybridization of oligonucleotides (ODNs) with Di in various positions to complementary sets of ODNs made as an array. The relative strength of nucleotide-pairing is I-C>I-A>I-G≈I-T. Generally, Di containing duplexes showed lower Tₘ values when compared to the corresponding wild type (WT) nucleotide pair. The stabilization of Di by pairing was in order of Dc>Da>Dg>Dt>Du. As a person of skill in the art would understand, although universal-binding nucleotides are used herein as an example of determining duplex stability (i.e., the Tₘ value), other nucleotide substitutions (e.g., 5-methyluridine for uridine) or further modifications (e.g., a ribose modification at the 2′-position) can also be evaluated by these or similar methods.

[0150] In still further embodiments of the presently disclosed methods, one or more anti-codon within an antisense strand of a dsRNA molecule or analog thereof is substituted with a universal-binding nucleotide in a second or third position in the anti-codon of the antisense strand. By substituting a universal-binding nucleotide for a first or second position, the one or more first or second position nucleotide-pair substitution allows the substituted dsRNA molecule to specifically bind to mRNA wherein a first or a second position nucleotide-pair substitution has occurred, wherein the one or more nucleotide-pair substitution results in an amino acid change in the corresponding gene product.

[0151] Any of these methods of identifying dsRNA of interest can also be used to examine a dsRNA that decreases expression of an AKT gene by RNA interference, comprising a first strand that is complementary to an AKT mRNA set forth in any one of SEQ ID NOS:1158, 1159, 1160, 1972, 2483, or 2484 and a second and third strand that have non-overlapping complementarity to the first strand, wherein the first and at least one of the second or third strand form a double-stranded region of about 5 to about 13 base pairs; wherein at least one pyrimidine of the dsRNA comprises a pyrimidine nucleoside according to Formula I or II:

[chemical structure]

wherein R¹ and R² are each independently a —H, —OH, —OCH₃, —OCH₂OCH₂CH₃, —OCH₂CH₂OCH₃, halogen, substituted or unsubstituted C₁-C₁₀ alkyl, alkoxy, alkoxyalkyl, hydroxyalkyl, carboxyalkyl, alkylsulfonylamino, aminoalkyl, dialkylamino, alkylaminoalkyl, dialkylaminoalkyl, haloalkyl, trifluoromethyl, cycloalkyl, (cycloalkyl)alkyl, substituted or unsubstituted C₂-C₁₀ alkenyl, substituted or unsubstituted —O-allyl, —O—CH₂CH═CH₂, —O—CH═CHCH₃, substituted or unsubstituted C₂-C₁₀ alkynyl, carbamoyl, carbamyl, carboxy, carbonylamino, substituted or unsubstituted aryl, substituted or unsubstituted aralkyl, —NH₂, —NO₂, —C≡N, or heterocyclo group; R³ and R⁴ are each independently a hydroxyl, a protected hydroxyl, or an internucleoside linking group; and R⁵ and R⁸ are independently O or S. In certain embodiments, at least one nucleoside is according to Formula I in which R¹ is methyl and R² is —OH, or R¹ is methyl, R² is —OH, and R⁸ is S. In certain embodiments, at least one nucleoside is according to Formula I in which R¹ is methyl and R² is —O-methyl, or R¹ is methyl, R² is —O-methyl, and R⁸ is O. In other embodiments, the internucleoside linking group covalently links from about 5 to about 40 nucleosides.

### Compositions and Methods of Use

[0152] As set forth herein, dsRNA of the instant disclosure are designed to target an AKT gene (including one or more mRNA splice variant thereof) that is expressed at an elevated level or continues to be expressed when it should not, and is a causal or contributing factor associated with, for example, one or more hyperproliferative disorders, including lymphomas, melanomas, prostate cancer, breast cancer, prostate cancer, ovarian cancer, pancreatic cancer, thyroid cancer, and colorectal cancer; cancer metastasis; and one or more inflammatory disorders, including diabetes, and schizophrenia. In this context, a dsRNA or analog thereof of this disclosure will effectively downregulate expression of an AKT gene to levels that prevent, alleviate, or reduce the severity or recurrence of one or more associated disease symptoms. Alternatively, for various distinct disease models in which expression of an AKT gene is not necessarily elevated as a consequence or sequel of disease or other adverse condition, down regulation of an AKT gene will nonetheless result in a therapeutic result by lowering gene expression (i.e., to reduce levels of a selected mRNA or protein product of an AKT gene). Furthermore, dsRNAs of this disclosure may be targeted to lower expression of AKT, which can result in upregulation of a “downstream” gene whose expression is negatively regulated, directly or indirectly, by an AKT protein. The dsRNA molecules of the instant disclosure comprise useful reagents and can be used in methods for a variety of therapeutic, diagnostic, target validation, genomic discovery, genetic engineering, and pharmacogenomic applications.

[0153] In certain embodiments, aqueous suspensions contain dsRNA of this disclosure in admixture with suitable excipients, such as suspending agents or dispersing or wetting agents. Exemplary suspending agents include sodium carboxymethylcellulose, methylcellulose, hydropropyl-methylcellulose, sodium alginate, polyvinylpyrrolidone, gum tragacanth and gum acacia. Representative dispersing or wetting agents include naturally-occurring phosphatides (e.g., lecithin), condensation products of an alkylene oxide with fatty acids (e.g., polyoxyethylene stearate), condensation products of ethylene oxide with long chain aliphatic alcohols (e.g., heptadecaethyleneoxycetanol), condensation products of ethylene oxide with partial esters derived from fatty acids and hexitol (e.g., polyoxyethylene sorbitol monooleate), or condensation products of ethylene oxide with partial esters derived from fatty acids and hexitol anhydrides (e.g., polyethylene sorbitan monooleate). In certain embodiments, the aqueous suspensions can optionally contain one or more preservatives (e.g., ethyl or n-propyl-p-hydroxybenzoate), one or more coloring agents, one or more flavoring agents, or one or more sweetening agents (e.g., sucrose, saccharin). In additional embodiments, dispersible powders and granules suitable for preparation of an aqueous suspension by the addition of water provide dsRNA of this disclosure in admixture with a dispersing or wetting agent, suspending agent and optionally one or more preservative, coloring agent, flavoring agent, or sweetening agent.

[0154] The present disclosure includes dsRNA compositions prepared for storage or administration that include a pharmaceutically effective amount of a desired compound in a pharmaceutically acceptable carrier or diluent. Acceptable carriers or diluents for therapeutic use are well known in the pharmaceutical art, and are described, for example, in Remington's Pharmaceutical Sciences, Mack Publishing Co., A. R. Gennaro edit., 1985, hereby incorporated by reference herein. In certain embodiments, pharmaceutical compositions of this disclosure can optionally include preservatives, antioxidants, stabilizers, dyes, flavoring agents, or any combination thereof. Exemplary preservatives include sodium benzoate, sorbic acid, chlorobutanol, and esters of p-hydroxybenzoic acid.

[0155] The dsRNA compositions of the instant disclosure can be effectively employed as pharmaceutically-acceptable formulations. Pharmaceutically-acceptable formulations prevent, alter the occurrence or severity of, or treat (alleviate one or more symptom(s) to a detectable or measurable extent) of a disease state or other adverse condition in a subject. A pharmaceutically acceptable formulation includes salts of the above compounds, e.g., acid addition salts, such as salts of hydrochloric acid, hydrobromic acid, acetic acid, or benzene sulfonic acid. A pharmaceutical composition or formulation refers to a composition or formulation in a form suitable for administration into a cell, or a subject such as a human (e.g., systemic administration). The formulations of the present disclosure, having an amount of dsRNA sufficient to treat or prevent a disorder associated with AKT gene expression are, for example, suitable for topical (e.g., creams, ointments, skin patches, eye drops, ear drops) application or administration. Other routes of administration include oral, parenteral, sublingual, bladder wash-out, vaginal, rectal, enteric, suppository, nasal, and inhalation. The term parenteral, as used herein, includes subcutaneous, intravenous, intramuscular, intraarterial, intraabdominal, intraperitoneal, intraarticular, intraocular or retrobulbar, intraaural, intrathecal, intracavitary, intracelial, intraspinal, intrapulmonary or transpulmonary, intrasynovial, and intraurethral injection or infusion techniques. The pharmaceutical compositions of the present disclosure are formulated to allow the dsRNA contained therein to be bioavailable upon administration to a subject.

[0156] In further embodiments, dsRNA of this disclosure can be formulated as oily suspensions or emulsions (e.g., oil-in-water) by suspending dsRNA in, for example, a vegetable oil (e.g., arachis oil, olive oil, sesame oil or coconut oil) or a mineral oil (e.g., liquid paraffin). Suitable emulsifying agents can be naturally-occurring gums (e.g., gum acacia or gum tragacanth), naturally-occurring phosphatides (e.g., soy bean, lecithin, esters or partial esters derived from fatty acids and hexitol), anhydrides (e.g., sorbitan monooleate), or condensation products of partial esters with ethylene oxide (e.g., polyoxyethylene sorbitan monooleate). In certain embodiments, the oily suspensions or emulsions can optionally contain a thickening agent, such as beeswax, hard paraffin or cetyl alcohol. In related embodiments, sweetening agents and flavoring agents can optionally be added to provide palatable oral preparations. In yet other embodiments, these compositions can be preserved by optionally adding an anti-oxidant, such as ascorbic acid.

[0157] In further embodiments, dsRNA of this disclosure can be formulated as syrups and elixirs with sweetening agents (e.g., glycerol, propylene glycol, sorbitol, glucose or sucrose). Such formulations can also contain a demulcent, preservative, flavoring, coloring agent, or any combination thereof. In other embodiments, pharmaceutical compositions comprising dsRNA of this disclosure can be in the form of a sterile, injectable aqueous or oleaginous suspension. The sterile injectable preparation can also be a sterile, injectable solution or suspension in a non-toxic parenterally acceptable diluent or solvent (e.g., as a solution in 1,3-butanediol). Among the exemplary acceptable vehicles and solvents useful in the compositions of this disclosure is water, Ringer's solution, or isotonic sodium chloride solution. In addition, sterile, fixed oils may be employed as a solvent or suspending medium for the dsRNA of this disclosure. For this purpose, any bland fixed oil can be employed including synthetic mono- or diglycerides. In addition, fatty acids such as oleic acid find use in the preparation of parenteral formulations.

[0158] Within certain embodiments of this disclosure, pharmaceutical compositions and methods are provided that feature the presence or administration of one or more dsRNA or analogs thereof of this disclosure, combined, complexed, or conjugated with a polypeptide, optionally formulated with a pharmaceutically-acceptable carrier, such as a diluent, stabilizer, buffer, or the like. The negatively charged dsRNA molecules of this disclosure may be administered to a patient by any standard means, with or without stabilizers, buffers, or the like, to form a composition suitable for treatment. When it is desired to use a liposome delivery mechanism, standard protocols for formation of liposomes can be followed. The compositions of the present disclosure may also be formulated and used as a tablet, capsule or elixir for oral administration, suppository for rectal administration, sterile solution, or suspension for injectable administration, either with or without other compounds known in the art. Thus, dsRNAs of the present disclosure may be administered in any form, such as nasally, transdermally, parenterally, or by local injection.

[0159] In accordance with this disclosure, dsRNA molecules (optionally substituted or modified or conjugated), compositions thereof, and methods for inhibiting expression of an AKT gene in a cell or organism are provided. In certain embodiments, this disclosure provides methods and dsRNA compositions for treating a subject, including a human cell, tissue or individual, having a disease or at risk of developing a disease caused by or associated with the expression of an AKT gene. In one embodiment, the method includes administering a dsRNA of this disclosure or a pharmaceutical composition containing the dsRNA to a cell or an organism, such as a mammal, such that expression of the target gene is silenced. Subjects (e.g., mammalian, human) amendable for treatment using the dsRNA molecules (optionally substituted or modified or conjugated), compositions thereof, and methods of the present disclosure include those suffering from one or more disease or condition mediated, at least in part, by overexpression or inappropriate expression of an AKT gene, or which are amenable to treatment by reducing expression of an AKT protein, including one or more hyperproliferative disorders, including lymphomas, melanomas, prostate cancer, breast cancer, prostate cancer, ovarian cancer, pancreatic cancer, thyroid cancer, and colorectal cancer; cancer metastasis; and one or more inflammatory disorders, including diabetes, and schizophrenia. Within exemplary embodiments, the compositions and methods of this disclosure are also useful as therapeutic tools to regulate expression of AKT to treat or prevent symptoms of, for example, the conditions listed above.

[0160] In any of the methods disclosed herein there may be used with one or more dsRNA, or substituted or modified dsRNA, as described herein, comprising a first strand that is complementary to a human v-AKT murine thymoma viral oncogene (AKT) mRNA as set forth in any one of SEQ ID NOS:1158, 1159, 1160, 1972, 2483, or 2484, and a second strand and a third strand that is each complementary to non-overlapping regions of the first strand, wherein the second strand and third strands can anneal with the first strand to form at least two double-stranded regions spaced apart by up to 10 nucleotides and thereby forming a gap between the second and third strands, and wherein the mdRNA molecule optionally includes at least one double-stranded region comprising from 5 base pairs to 13 base pairs. In other embodiments, subjects can be effectively treated, prophylactically or therapeutically, by administering an effective amount of one or more dsRNA having a first strand that is complementary to a human v-AKT murine thymoma viral oncogene (AKT) mRNA as set forth in any one of SEQ ID NOS:1158, 1159, 1160, 1972, 2483, or 2484, and a second strand and a third strand that is each complementary to non-overlapping regions of the first strand, wherein the second strand and third strands can anneal with the first strand to form at least two double-stranded regions spaced apart by up to 10 nucleotides and thereby forming a gap between the second and third strands, and the mdRNA molecule optionally includes at least one double-stranded region comprising from 5 base pairs to 13 base pairs and at least one pyrimidine nucleoside of the mdRNA is according to Formula I or II:

[chemical structure]

wherein R¹ and R² are each independently a —H, —OH, —OCH₃, —OCH₂OCH₂CH₃, —OCH₂CH₂OCH₃, halogen, substituted or unsubstituted C₁-C₁₀ alkyl, alkoxy, alkoxyalkyl, hydroxyalkyl, carboxyalkyl, alkylsulfonylamino, aminoalkyl, dialkylamino, alkylaminoalkyl, dialkylaminoalkyl, haloalkyl, trifluoromethyl, cycloalkyl, (cycloalkyl)alkyl, substituted or unsubstituted C₂-C₁₀ alkenyl, substituted or unsubstituted —O-allyl, —O—CH₂CH═CH₂, —O—CH═CHCH₃, substituted or unsubstituted C₂-C₁₀ alkynyl, carbamoyl, carbamyl, carboxy, carbonylamino, substituted or unsubstituted aryl, substituted or unsubstituted aralkyl, —NH₂, —NO₂, —C≡N, or heterocyclo group; R³ and R⁴ are each independently a hydroxyl, a protected hydroxyl, or an internucleoside linking group; and R⁵ and R⁸ are independently O or S. In certain embodiments, at least one nucleoside is according to Formula I in which R¹ is methyl and R² is —OH, or R¹ is methyl, R² is —OH, and R⁸ is S. In certain embodiments, at least one nucleoside is according to Formula I in which R¹ is methyl and R² is —O-methyl, or R¹ is methyl, R² is —O-methyl, and R⁸ is O. In other embodiments, the internucleoside linking group covalently links from about 5 to about 40 nucleosides.

[0161] In any of the methods described herein, the dsRNA used may include multiple modifications. For example, a dsRNA can have at least one 5-methyluridine, 2′-O-methyl-5-methyluridine, LNA, 2′-methoxy, 2′-fluoro, 2′-deoxy, phosphorothioate linkage, inverted base terminal cap, or any combination thereof. In certain exemplary methods, a dsRNA will have from one to all 5-methyluridines and have up to about 75% LNA. In other exemplary methods, a dsRNA will have from one to all 5-methyluridines and have up to about 75% 2′-methoxy provided the 2′-methoxy are not at the Argonaute cleavage site. In still other exemplary methods, a dsRNA will have from one to all 5-methyluridines and have up to about 100% 2′-fluoro substitutions. In further exemplary methods, a dsRNA will have from one to all 5-ethyluridines and have up to about 75% 2′-deoxy. In further exemplary methods, a dsRNA will have up to about 75% LNA and have up to about 75% 2′-methoxy. In still other embodiments, a dsRNA will have up to about 75% LNA and have up to about 100% 2′-fluoro. In further exemplary methods, a dsRNA will have up to about 75% LNA and have up to about 75% 2′-deoxy. In further exemplary methods, a dsRNA will have up to about 75% 2′-methoxy and have up to about 100% 2′-fluoro. In further exemplary methods, a dsRNA will have up to about 75% 2′-methoxy and have up to about 75% 2′-deoxy. In further embodiments, a dsRNA will have up to about 100% 2′-fluoro and have up to about 75% 2′-deoxy.

[0162] In other exemplary methods for using multiply modified dsRNA, a dsRNA will have from one to all uridines substituted with 5-methyluridine, up to about 75% LNA, and up to about 75% 2′-methoxy. In still further exemplary methods, a dsRNA will have from one to all 5-methyluridines, up to about 75% LNA, and up to about 100% 2′-fluoro. In further exemplary methods, a dsRNA will have from one to all 5-methyluridines, up to about 75% LNA, and up to about 75% 2′-deoxy. In further exemplary methods, a dsRNA will have from one to all 5-methyluridines, up to about 75% 2′-methoxy, and up to about 75% 2′-fluoro. In further exemplary methods, a dsRNA will have from one to all 5-methyluridines, up to about 75% 2′-methoxy, and up to about 75% 2′-deoxy. In more exemplary methods, a dsRNA will have from one to all 5-methyluridines, up to about 100% 2′-fluoro, and up to about 75% 2′-deoxy. In yet other exemplary methods, a dsRNA will have from one to all 5-methyluridines, up to about 75% LNA, up to about 75% 2′-methoxy, up to about 100% 2′-fluoro, and up to about 75% 2′-deoxy. In other exemplary methods, a dsRNA will have up to about 75% LNA, up to about 75% 2′-methoxy, and up to about 100% 2′-fluoro. In further exemplary methods, a dsRNA will have up to about 75% LNA, up to about 75% 2′-methoxy, and up to about 75% 2′-deoxy. In more exemplary methods, a dsRNA will have up to about 75% LNA, up to about 100% 2′-fluoro, and up to about 75% 2′-deoxy. In still further exemplary methods, a dsRNA will have up to about 75% 2′-methoxy, up to about 100% 2′-fluoro, and up to about 75% 2′-deoxy.

[0163] In any of these exemplary methods for using multiply modified dsRNA, the dsRNA may further comprise up to 100% phosphorothioate internucleoside linkages, from one to ten or more inverted base terminal caps, or any combination thereof. Additionally, any of these dsRNA may have these multiple modifications on one strand, two strands, three strands, a plurality of strands, or all strands, or on the same or different nucleoside within a dsRNA molecule. Finally, in any of these multiple modification dsRNA, the dsRNA must have gene silencing activity.

[0164] In further embodiments, subjects can be effectively treated, prophylactically or therapeutically, by administering an effective amount of one or more dsRNA, or substituted or modified dsRNA as described herein, having a first strand that is complementary to a human AKT mRNA as set forth in any one of SEQ ID NO:1158, 1159, 1160, 1972, 2483, or 2484, and a second strand and a third strand that is each complementary to non-overlapping regions of the first strand, wherein the second strand and third strands can anneal with the first strand to form at least two double-stranded regions spaced apart by up to 10 nucleotides and thereby forming a gap between the second and third strands, and wherein the combined double-stranded regions total about 15 base pairs to about 40 base pairs and the mdRNA molecule optionally has blunt ends. In still further embodiments, methods disclosed herein there may be used with one or more dsRNA that comprises a first strand that is complementary to a human AKT mRNA as set forth in any one of SEQ ID NOS:1158, 1159, 1160, 1972, 2483, or 2484, and a second strand and a third strand that is each complementary to non-overlapping regions of the first strand, wherein the second strand and third strands can anneal with the first strand to form at least two double-stranded regions spaced apart by up to 10 nucleotides and thereby forming a gap between the second and third strands, and wherein the mdRNA molecule optionally includes at least one double-stranded region comprising from 5 to 13 base pairs, and at least one pyrimidine nucleoside of the mdRNA is according to Formula I or II:

[chemical structure]

wherein R¹ and R² are each independently a —H, —OH, —OCH₃, —OCH₂OCH₂CH₃, —OCH₂CH₂OCH₃, halogen, substituted or unsubstituted C₁-C₁₀ alkyl, alkoxy, alkoxyalkyl, hydroxyalkyl, carboxyalkyl, alkylsulfonylamino, aminoalkyl, dialkylamino, alkylaminoalkyl, dialkylaminoalkyl, haloalkyl, trifluoromethyl, cycloalkyl, (cycloalkyl)alkyl, substituted or unsubstituted C₂-C₁₀ alkenyl, substituted or unsubstituted —O-allyl, —O—CH₂CH═CH₂, —O—CH═CHCH₃, substituted or unsubstituted C₂-C₁₀ alkynyl, carbamoyl, carbamyl, carboxy, carbonylamino, substituted or unsubstituted aryl, substituted or unsubstituted aralkyl, —NH₂, —NO₂, —C≡N, or heterocyclo group; R³ and R⁴ are each independently a hydroxyl, a protected hydroxyl, or an internucleoside linking group; and R⁵ and R⁸ are independently O or S. In certain embodiments, at least one nucleoside is according to Formula I in which R¹ is methyl and R² is —OH, or R¹ is methyl, R² is —OH, and R⁸ is S. In certain embodiments, at least one nucleoside is according to Formula I in which R¹ is methyl and R² is —O-methyl, or R¹ is methyl, R² is —O-methyl, and R⁸ is O. In other embodiments, the internucleoside linking group covalently links from about 5 to about 40 nucleosides.

[0165] In certain aspects, a single mdRNA molecule will be specific for more than one AKT. For example, an mdRNA molecule of this disclosure can target AKT1 and AKT2, or AKT1 and AKT3, or AKT2 and AKT3, or AKT1, AKT2, and AKT3. In one embodiment, the mdRNA has a first strand of 19 to 23 or 25 to 29 nucleotides in length that is complementary to human AKT1 of SEQ ID NO:1158, 1159, 1160, or 1160, and is fully complementary, with up to three mismatches, to at least one other human AKT family mRNA as set forth in SEQ ID NO:1972, 2483, or 2484 (i.e., AKT2, AKT3 variant 1, or AKT3 variant 2), or any combination thereof. In another embodiment, an mdRNA of this disclosure has a first strand of 19 to 23 or 25 to 29 nucleotides in length and is fully complementary to a human AKT1 and AKT2 nucleic acid sequence as set forth in SEQ ID NO:1219. Other sequences that recognize multiple AKT genes include SEQ ID NOS: 1183, 1190-1193, 1200, 1208-1209, 1212-1214, 1216-1221, 1225-1226, 1230, 1232-1238, 1240-1244, 1246, 1249, 1258, 1280, 1327-1328, 1330, 1333, 1337, 1340, 1352-1355, 1357-1365, 1370-1371, 1375, 1377-1389, 1391, 1395, 1399, 1402-1403, 1453, 1494, 1496, 1499, 1501, 1503-1504, 1506, 1518-1521, 1523-1525, 1527-1532, 1536-1537, 1541, 1543-1549, 1551-1555, 1557, 1563, 1569, 1617, 1976, 1990-1991, 1993, 2000, 2003, 2008, 2012, 2016, 2017, 2019, 2020-2022, 2024-2029, 2032-2034, 2037, 2039-2044, 2046-2051, 2053, 2057, 2061, 2065, 2493, 2502, 2504, 2519-2520, 2526, 2528, 2531, 2534-2536, 2538, 2543-2545, 2547, 2552, 2562, and 2862-4417.

[0166] Within additional aspects of this disclosure, combination formulations and methods are provided comprising an effective amount of one or more dsRNA of the present disclosure in combination with one or more secondary or adjunctive active agents that are formulated together or administered coordinately with the dsRNA of this disclosure to control an AKT-associated disease or condition as described herein. Useful adjunctive therapeutic agents in these combinatorial formulations and coordinate treatment methods include, for example, enzymatic nucleic acid molecules, allosteric nucleic acid molecules, antisense, decoy, or aptamer nucleic acid molecules, antibodies such as monoclonal antibodies, small molecules and other organic or inorganic compounds including metals, salts and ions, and other drugs and active agents indicated for treating an AKT-associated disease or condition, including chemotherapeutic agents used to treat cancer, steroids, non-steroidal anti-inflammatory drugs (NSAIDs), tyrosine kinase inhibitors, or the like.

[0167] Exemplary chemotherapeutic agents include alkylating agents (e.g., cisplatin, oxaliplatin, carboplatin, busulfan, nitrosoureas, nitrogen mustards, uramustine, temozolomide), antimetabolites (e.g., aminopterin, methotrexate, mercaptopurine, fluorouracil, cytarabine), taxanes (e.g., paclitaxel, docetaxel), anthracyclines (e.g., doxorubicin, daunorubicin, epirubicin, idaruicin, mitoxantrone, valrubicin), bleomycin, mytomycin, actinomycin, hydroxyurea, topoisomerase inhibitors (e.g., camptothecin, topotecan, irinotecan, etoposide, teniposide), monoclonal antibodies (e.g., alemtuzumab, bevacizumab, cetuximab, gemtuzumab, panitumumab, rituximab, tositumomab, trastuzumab), vinca alkaloids (e.g., vincristine, vinblastine, vindesine, vinorelbine), cyclophosphamide, prednisone, leucovorin, oxaliplatin.

[0168] Some adjunctive therapies may be directed at targets that interact or associate with AKT1 or affect specific AKT1 biological activities. For example, lipid-based AKT1 inhibitors include, for example, perifosine, phosphatidylinositol ether lipid analogues, and D-3-deoxy-phosphatidulmyoinositol-1-[(R)-2-methoxy-3-octadecyloxypropyl hydrogen phosphate] (PX-316). Perifosine inhibits translocation of AKT1 to the cell membrane and inhibits the growth of melanoma, lung, prostate, colon, and breast cancer cells in association with inhibition of AKT1 activity. Kondapaka et al., Mol. Cancer Ther. 2:1093, 2005 and Crul et al., Eur. J. Cancer 38:1615, 2002. Phosphatidylinositol ether lipid analogues, which are designed to interact with the pleckstrin homology domain of AKT1, inhibit AKT1 activation and translocation, selectively induce apoptosis in cancer cells having high levels of consitutively active AKT1, and increase the efficacy of many therapeutic agents or radiation. Castillo et al., Cancer Res. 64:2782, 2004 and Martelli et al., Leukemia 17:1794, 2003. PX-316 also binds to the pleckstrin homology domain of AKT1 thereby preventing membrane localization. Meuillet et al., Mol. Cancer Ther. 2:389, 2003.

[0169] Exemplary small molecule AKT1 inhibitors include, for example, the AKT/protein kinase B signaling inhibitor-2 (API-2), 9-methoxy-2-methyl-ellipticinium acetate (API-59CJ-OMe), the indazole-pyridine A-443654, and isoform-specific canthine alkaloid analogues. API-2 is a tricyclic nucleoside that inhibits AKT1 kinase activity and stimulates apoptosis of xenografts of human cancer cells exhibiting high AKT1 activity. Yang et al., Cancer Res. 64:4394, 2004. API-59CJ-OMe inhibits AKT1 kinase activity in endometrial cancer cells exhibiting high levels of AKT1 activity and preferentially induces apoptosis. Jin et al., Br. J. Cancer 91:1808, 2004. The indazole-pyridine A-443654 inhibits signaling downstream of AKT1. Isoform-specific AKT inhibitors include, for example, canthine alkaloid analogues, which specifically inhibit AKT1, AKT2, or both AKT1 and AKT2. Linsley et al., Bioorg. Med. Chem. Lett. 15:761, 2005; Barnett et al., Biochem. J. 385:399, 2005; and Defeo-Jones et al., Mol. Cancer. Ther. 4:271, 2005. Other exemplary inhibitors of AKT1 are peptide-based, such as, for example, AKT-in, a 15-amino-acid peptide that mimics the interaction between AKT1 and a binding protein TCL1 (Hiromura et al., J. Biol. Chem. 279:53407, 2004). Pseudopeptide substrates that bind to a consensus sequence of AKT1 and single-chain antibodies (scFv) against AKT1 have been described, which inhibit AKT1 and the growth of cancer cells (Luo et al., Biochemistry 43:1254, 2004 and Shin et al., Cancer Res. 65:2815, 2005).

[0170] Some adjunctive therapies may be directed at targets that interact or associate with AKT2 or affect specific AKT2 biological activities. Exemplary lipid-based AKT2 inhibitors include, for example, octadecyl-(1,1-dimethyl-piperidino-4-yl)-phosphate (perifosine) and phosphatidylinositol ether lipid analogues. Perifosine is a synthetic novel alkylphospholipid that inhibits translocation of AKT2 to the cell membrane (Hideshima et al., Blood 107:10, 2006). Phosphatidylinositol ether lipid analogues, which are designed to interact with the pleckstrin homology domain of AKT2, inhibit AKT2 activation and translocation, selectively induce apoptosis in cancer cells having high levels of consitutively active AKT2, and increase the efficacy of many therapeutic agents or radiation (Castillo et al., Cancer Res. 64, 2004).

[0171] Other AKT2 inhibitors are small molecules, such as, for example, the AKT2/protein kinase B signaling inhibitor-2 (API-2), AKT-I-1,2, wortmannin, LY294002, farnesyltranferase inhibitors (FTIs), 2,3-diphenylquinoxaline, 5,6-diphenyl-pyrazin-2(1H)-one, 2,3,5-trisubstituted pyridine core, and 9-methoxy-2-methyl-ellipticinium acetate (API-59CJ-OMe). API-2 is a tricyclic nucleoside that inhibits AKT2 kinase activity and stimulates apoptosis of xenografts of human cancer cells exhibiting high AKT2 activity (Yang et al., Cancer Res. 64, 2004). AKT-I-1,2 was shown to bind to the pleckstrin homology domain and block prosphorylation and activation of AKT2 by phosphoinositide-dependent kinase 1 (Barnett et al., Biochem J. 385, 2005). Class I PI3-K inhibitors wortmannin and LY294002 have been shown to inhibit AKT2 by blocking the AKT2/PI3-K pathway (Amaravadi et al., J. Clin. Invest. 115:10, 2005). FTI-277 has been shown to inhibit phosphatidylinositol 3-OH kinase/AKT2-mediated growth factor- and adhesion-dependent survival pathways and induce apoptosis in human cancer cells that overexpress AKT2 (Jiang et al., Mol. Cell. Biol. 20:1, 2000). A 2,3-diphenylquinoxaline inhibitor was shown to bind to the pleckstrin homology domain to inhibit AKT2, a series of 5,6-diphenyl-pyrazin-2(1H)-one derivatives were shown to selectively inhibit AKT2 in caspase-3 assays, and 2,3,5-trisubstituted pyridine core AKT2 inhibitors have been shown to have improved aqueous solubility, cell permeability, and a smaller molecular weight than the two previously-discussed types of AKT2 inhibitors (Zhao et al., Bioorg. Med. Chem. Lett. 15, 2005). API-59CJ-OMe inhibits AKT2 kinase activity in endometrial cancer cells exhibiting high levels of AKT2 activity and preferentially induces apoptosis (Jin et al., Br. J. Cancer 91, 2004).

[0172] Further exemplary AKT2 inhibitors are peptide-based, such as, for example, AKT-in, pseudopeptide substrates, and single-chain antibodies (scFv). AKT-in is a 15-amino-acid peptide that mimics the interaction between AKT2 and a binding protein TCL1 (Hiromura et al., J. Biol. Chem. 279:51, 2004). Pseudopeptide substrates that bind to a consensus sequence of AKT2 and single-chain antibodies (scFv) against AKT2 have been described, which inhibit AKT2 and the growth of cancer cells (Shin et al., Cancer Res. 65:7, 2005).

[0173] Some adjunctive therapies may be directed at targets that interact or associate with AKT3 or affect specific AKT3 biological activities. Exemplary lipid-based AKT3 inhibitors include, for example, octadecyl-(1,1-dimethyl-piperidino-4-yl)-phosphate (perifosine) and phosphatidylinositol ether lipid analogues. Perifosine is a synthetic novel alkylphospholipid that inhibits translocation of AKT3 to the cell membrane (Hideshima et al., Blood 107:10, 2006). Phosphatidylinositol ether lipid analogues, which are designed to interact with the pleckstrin homology domain of AKT3, inhibit AKT3 activation and translocation, selectively induce apoptosis in cancer cells having high levels of consitutively active AKT3, and increase the efficacy of many therapeutic agents or radiation (Castillo et al., Cancer Res. 64, 2004).

[0174] Small molecule AKT3 inhibitors include, for example, the AKT3/protein kinase B signaling inhibitor-2 (API-2), AKT-I-1,2, wortmannin, LY294002, 9-methoxy-2-methyl-ellipticinium acetate (API-59CJ-OMe), staurosporine, and Ro 31-8220. API-2 is a tricyclic nucleoside that inhibits AKT3 kinase activity and stimulates apoptosis of xenografts of human cancer cells exhibiting high AKT3 activity (Yang et al., Cancer Res. 64, 2004). Class I PI3-K inhibitors wortmannin and LY294002 have been shown to inhibit AKT3 by blocking the AKT3/PI3-K pathway (Amaravadi et al, J. Clin. Invest. 115:10, 2005). API-59CJ-OMe inhibits AKT3 kinase activity in endometrial cancer cells exhibiting high levels of AKT3 activity and preferentially induces apoptosis (Jin et al., Br. J. Cancer 91, 2004). AKT3 has been shown to be inhibited by staurosporine, a broad spectrum kinase inhibitor, and by Ro 31-8220, a more selective protein kinase C inhibitor (Masure et al., Eur. J. Biochem. 265, 1999).

[0175] Peptide-based inhibitors of AKT3 include, for example, AKT-in, pseudopeptide substrates, and single-chain antibodies (scFv). AKT-in is a 15-amino-acid peptide that mimics the interaction between AKT3 and a binding protein TCL1 (Hiromura et al., J. Biol. Chem. 279:51, 2004). Pseudopeptide substrates that bind to a consensus sequence of AKT3 and single-chain antibodies (scFv) against AKT3 have been described, which inhibit AKT3 and the growth of cancer cells (Shin et al., Cancer Res. 65:7, 2005).

[0176] To practice the coordinate administration methods of this disclosure, a dsRNA is administered, simultaneously or sequentially, in a coordinated treatment protocol with one or more of the secondary or adjunctive therapeutic agents contemplated herein. The coordinate administration may be done in any order, and there may be a time period while only one or both (or all) active therapeutic agents, individually or collectively, exert their biological activities. A distinguishing aspect of all such coordinate treatment methods is that the dsRNA present in a composition elicits some favorable clinical response, which may or may not be in conjunction with a secondary clinical response provided by the secondary therapeutic agent. For example, the coordinate administration of the dsRNA with a secondary therapeutic agent as contemplated herein can yield an enhanced (synergistic) therapeutic response beyond the therapeutic response elicited by either or both the purified dsRNA or secondary therapeutic agent alone.

[0177] In another embodiment, a dsRNA of this disclosure can include a conjugate member on one or more of the terminal nucleotides of a dsRNA. The conjugate member can be, for example, a lipophile, a terpene, a protein binding agent, a vitamin, a carbohydrate, or a peptide. For example, the conjugate member can be naproxen, nitroindole (or another conjugate that contributes to stacking interactions), folate, ibuprofen, or a C5 pyrimidine linker. In other embodiments, the conjugate member is a glyceride lipid conjugate (e.g., a dialkyl glyceride derivatives), vitamin E conjugates, or thio-cholesterols. Additional conjugate members include peptides that function, when conjugated to a modified dsRNA of this disclosure, to facilitate delivery of the dsRNA into a target cell, or otherwise enhance delivery, stability, or activity of the dsRNA when contacted with a biological sample (e.g., a target cell expressing AKT). Exemplary peptide conjugate members for use within these aspects of this disclosure, include peptides PN27, PN28, PN29, PN58, PN61, PN73, PN158, PN159, PN173, PN182, PN183, PN202, PN204, PN250, PN361, PN365, PN404, PN453, PN509, and PN963, described, for example, in U.S. Patent Application Publication Nos. 2006/0040882 and 2006/0014289, and U.S. Provisional Patent Application Nos. 60/822,896 and 60/939,578; and PCT Application PCT/US2007/075744, which are all incorporated herein by reference. In certain embodiments, when peptide conjugate partners are used to enhance delivery of dsRNA of this disclosure, the resulting dsRNA formulations and methods will often exhibit further reduction of an interferon response in target cells as compared to dsRNAs delivered in combination with alternate delivery vehicles, such as lipid delivery vehicles (e.g., Lipofectamine™).

[0178] In still another embodiment, a dsRNA or analog thereof of this disclosure may be conjugated to the polypeptide and admixed with one or more non-cationic lipids or a combination of a non-cationic lipid and a cationic lipid to form a composition that enhances intracellular delivery of the dsRNA as compared to delivery resulting from contacting the target cells with a naked dsRNA. In more detailed aspects of this disclosure, the mixture, complex or conjugate comprising a dsRNA and a polypeptide can be optionally combined with (e.g., admixed or complexed with) a cationic lipid, such as Lipofectine™. To produce these compositions comprised of a polypeptide, dsRNA and a cationic lipid, the dsRNA and peptide may be mixed together first in a suitable medium such as a cell culture medium, after which the cationic lipid is added to the mixture to form a dsRNA/delivery peptide/cationic lipid composition. Optionally, the peptide and cationic lipid can be mixed together first in a suitable medium such as a cell culture medium, followed by the addition of the dsRNA to form the dsRNA/delivery peptide/cationic lipid composition.

[0179] This disclosure also features the use of dsRNA compositions comprising surface-modified liposomes containing, for example, poly(ethylene glycol) lipids (PEG-modified, or long-circulating liposomes or stealth liposomes) (Lasic et al., Chem. Rev. 95:2601, 1995; Ishiwata et al., Chem. Pharm. Bull. 43:1005, 1995; Lasic et al., Science 267:1275, 1995; Oku et al., Biochim. Biophys. Acta 1238:86, 1995; Liu et al., J. Biol. Chem. 42:24864, 1995; Choi et al., PCT Publication No. WO 96/10391; Ansell et al., PCT Publication No. WO 96/10390; Holland et al., PCT Publication No. WO 96/10392).

[0180] In another embodiment, compositions are provided for targeting dsRNA molecules of this disclosure to specific cell types, such as hepatocytes. For example, dsRNA can be complexed or conjugated glycoproteins or synthetic glycoconjugates glycoproteins or synthetic glycoconjugates having branched galactose (e.g., asialoorosomucoid), N-acetyl-D-galactosamine, or mannose (see, e.g., Wu and Wu, J. Biol. Chem. 262:4429, 1987; Baenziger and Fiete, Cell 22: 611, 1980; Connolly et al., J. Biol. Chem. 257:939, 1982; Lee and Lee, Glycoconjugate J. 4:317, 1987; Ponpipom et al., J. Med. Chem. 24:1388, 1981) for a targeted delivery to, for example, the liver.

[0181] A pharmaceutically effective dose is that dose required to prevent, inhibit the occurrence of, or treat (alleviate a symptom to some extent, preferably all of the symptoms) a disease state. The pharmaceutically effective dose depends on the type of disease, the composition used, the route of administration, the type of subject being treated, the physical characteristics of the specific subject under consideration for treatment, concurrent medication, and other factors that those skilled in the medical arts will recognize. For example, an amount between 0.1 mg/kg and 100 mg/kg body weight/day of active ingredients may be administered depending on the potency of a dsRNA of this disclosure.

[0182] A specific dose level for any particular patient depends upon a variety of factors including the activity of the specific compound employed, age, body weight, general health, sex, diet, time of administration, route of administration, rate of excretion, drug combination, and the severity of the particular disease undergoing therapy. Following administration of dsRNA compositions as disclosed herein, test subjects will exhibit about a 10% up to about a 99% reduction in one or more symptoms associated with the disease or disorder being treated, as compared to placebo-treated or other suitable control subjects.

[0183] Dosage levels in the order of about 0.1 mg to about 140 mg per kilogram of body weight per day can be useful in the treatment of the above-indicated conditions (about 0.5 mg to about 7 g per patient per day). The amount of active ingredient that can be combined with the carrier materials to produce a single dosage form varies depending upon the host treated and the particular mode of administration. Dosage unit forms generally contain between from about 1 mg to about 500 mg of an active ingredient.

[0184] A dosage form of a dsRNA or composition thereof of this disclosure can be liquid, an emulsion, or a micelle, or in the form of an aerosol or droplets. A dosage form of a dsRNA or composition thereof of this disclosure can be solid, which can be reconstituted in a liquid prior to administration. The solid can be administered as a powder. The solid can be in the form of a capsule, tablet, or gel. In addition to in vivo gene inhibition, a skilled artisan will appreciate that the dsRNA and analogs thereof of the present disclosure are useful in a wide variety of in vitro applications, such as scientific and commercial research (e.g., elucidation of physiological pathways, drug discovery and development), and medical and veterinary diagnostics.

[0185] Nucleic acid molecules and polypeptides can be administered to cells by a variety of methods known to those of skill in the art, including administration within formulations that comprise a dsRNA alone, a dsRNA and a polypeptide complex/conjugate alone, or that further comprise one or more additional components, such as a pharmaceutically acceptable carrier, diluent, excipient, adjuvant, emulsifier, stabilizer, preservative, or the like. Other exemplary substances used to approximate physiological conditions include pH adjusting and buffering agents, tonicity adjusting agents, and wetting agents, for example, sodium acetate, sodium lactate, sodium chloride, potassium chloride, calcium chloride, sorbitan monolaurate, triethanolamine oleate, and mixtures thereof. For solid compositions, conventional nontoxic pharmaceutically acceptable carriers can be used which include, for example, pharmaceutical grades of mannitol, lactose, starch, magnesium stearate, sodium saccharin, talcum, cellulose, glucose, sucrose, magnesium carbonate, and the like.

[0186] In certain embodiments, the dsRNA and compositions thereof can be encapsulated in liposomes, administered by iontophoresis, or incorporated into other vehicles, such as hydrogels, cyclodextrins, biodegradable nanocapsules, bioadhesive microspheres, or proteinaceous vectors (see, e.g., PCT Publication No. WO 00/53722). In certain embodiments of this disclosure, the dsRNA may be administered in a time release formulation, for example, in a composition that includes a slow release polymer. The dsRNA can be prepared with carriers that will protect against rapid release, for example, a controlled release vehicle such as a polymer, microencapsulated delivery system, or bioadhesive gel. Prolonged delivery of the dsRNA, in various compositions of this disclosure can be brought about by including in the composition agents that delay absorption, for example, aluminum monosterate hydrogels and gelatin.

[0187] Alternatively, a dsRNA composition of this disclosure can be locally delivered by direct injection or by use of, for example, an infusion pump. Direct injection of dsRNAs of this disclosure, whether subcutaneous, intramuscular, or intradermal, can be done by using standard needle and syringe methodologies or by needle-free technologies, such as those described in Conry et al. (Clin. Cancer Res. 5:2330, 1999) and PCT Publication No. WO 99/31262.

[0188] The dsRNA of this disclosure and compositions thereof may be administered to subjects by a variety of mucosal administration modes, including oral, rectal, vaginal, intranasal, intrapulmonary, or transdermal delivery, or by topical delivery to the eyes, ears, skin, or other mucosal surfaces. In one embodiment, the mucosal tissue layer includes an epithelial cell layer, which can be pulmonary, tracheal, bronchial, alveolar, nasal, buccal, epidermal, or gastrointestinal. Compositions of this disclosure can be administered using conventional actuators, such as mechanical spray devices, as well as pressurized, electrically activated, or other types of actuators. The dsRNAs can also be administered in the form of suppositories, e.g., for rectal administration. For example, these compositions can be mixed with an excipient that is solid at room temperature but liquid at the rectal temperature so that the dsRNA is released. Such materials include, for example, cocoa butter and polyethylene glycols.

[0189] Further methods for delivery of nucleic acid molecules, such as the dsRNAs of this disclosure, are described, for example, in Boado et al., J. Pharm. Sci. 87:1308, 1998; Tyler et al., FEBS Lett. 421:280, 1999; Pardridge et al., Proc. Nat'l Acad. Sci. USA 92:5592, 1995; Boado, Adv. Drug Delivery Rev. 15:73, 1995; Aldrian-Herrada et al., Nucleic Acids Res. 26:4910, 1998; Tyler et al., Proc. Nat'l Acad. Sci. USA 96:7053-7058, 1999; Akhtar et al., Trends Cell Bio. 2:139, 1992; “Delivery Strategies for Antisense Oligonucleotide Therapeutics,” ed. Akhtar, 1995, Maurer et al., Mol. Membr. Biol. 16:129, 1999; Hofland and Huang, Handb. Exp. Pharmacol 137:165, 1999; and Lee et al., ACS Symp. Ser. 752:184, 2000; PCT Publication No. WO 94/02595.

[0190] All U.S. patents, U.S. patent application publications, U.S. patent applications, foreign patents, foreign patent applications, non-patent publications, figures, tables, and websites referred to in this specification are expressly incorporated herein by reference, in their entirety.

### EXAMPLES

### Example 1

### Knockdown of Gene Expression by mdRNA

[0191] The gene silencing activity of dsRNA as compared to nicked or gapped versions of the same dsRNA was examined using a dual fluorescence assay. A total of 22 different genes were targeted at ten different sites each (see Table 1).

[0192] A Dicer substrate dsRNA molecule was used, which has a 25 nucleotide sense strand, a 27 nucleotide antisense strand, and a two deoxynucleotide overhang at the 3′-end of the antisense strand (referred to as a 25/27 dsRNA). The nicked version of each dsRNA Dicer substrate has a nick at one of positions 9 to 16 on the sense strand as measured from the 5′-end of the sense strand. For example, an ndsRNA having a nick at position 11 has three strands—a 5′-sense strand of 11 nucleotides, a 3′-sense strand of 14 nucleotides, and an antisense strand of 27 nucleotides (which is also referred to as an N11-14/27 mdRNA). In addition, each of the sense strands of the ndsRNA have three locked nucleic acids (LNAs) evenly distributed along each sense fragment. If the nick is at position 9, then the LNAs can be found at positions 2, 6, and 9 of the 5′ sense strand fragment and at positions 11, 18, and 23 of the 3′ sense strand fragment. If the nick is at position 10, then the LNAs can be found at positions 2, 6, and 10 of the 5′ sense strand fragment and at positions 12, 18, and 23 of the 3′ sense strand fragment. If the nick is at position 11, then the LNAs can be found at positions 2, 6, and 11 of the 5′ sense strand fragment and at positions 13, 18, and 23 of the 3′ sense strand fragment. If the nick is at position 12, then the LNAs can be found at positions 2, 6, and 12 of the 5′ sense strand fragment and at positions 14, 18, and 23 of the 3′ sense strand fragment. If the nick is at position 13, then the LNAs can be found at positions 2, 7, and 13 of the 5′ sense strand fragment and at positions 15, 18, and 23 of the 3′ sense strand fragment. If the nick is at position 14, then the LNAs can be found at positions 2, 7, and 14 of the 5′ sense strand fragment and at positions 16, 18, and 23 of the 3′ sense strand fragment. If the nick is at position 15, then the LNAs can be found at positions 2, 8, and 15 of the 5′ sense strand fragment and at positions 17, 19, and 23 of the 3′ sense strand fragment. If the nick is at position 16, then the LNAs can be found at positions 2, 8, and 16 of the 5′ sense strand fragment and at positions 18, 19, and 23 of the 3′ sense strand fragment. Similarly, a gapped version of each dsRNA Dicer substrate has a single nucleotide missing at one of positions 10 to 17 on the sense strand as measured from the 5′-end of the sense strand. For example, a gdsRNA having a gap at position 11 has three strands—a 5′-sense strand of 11 nucleotides, a 3′-sense strand of 13 nucleotides, and an antisense strand of 27 nucleotides (which is also referred to as G11-(1)-13/27 mdRNA). In addition, each of the sense strands of the gdsRNA contain three locked nucleic acids (LNAs) evenly distributed along each sense fragment (as described for the nicked counterparts).

[0193] In sum, three dsRNA were tested at each of the ten different sites per gene—an unmodified dsRNA, a nicked mdRNA with three LNAs per sense strand fragment, and a single nucleotide gapped mdRNA with three LNAs per sense strand fragment. In other words, 660 different dsRNA were examined.

[0194] Briefly, multiwell plates were seeded with about 7-8×10⁵ HeLa cells/well in DMEM having 10% fetal bovine serum, and incubated overnight at 37° C./5% CO₂. The HeLa cell medium was changed to serum-free DMEM just prior to transfection. The psiCHECK™-2 vector, containing about a 1,000 basepair insert of a target gene, diluted in serum-free DMEM was mixed with diluted GenJet™ transfection reagent (SignalDT Biosystems, Hayward, Calif.) according to the manufacturer's instructions and then incubated at room temperature for 10 minutes. The GenJet/psiCHECK™-2-[target gene insert] solution was added to the HeLa cells and then incubated at 37° C., 5% CO₂ for 4.5 hours. After the vector transfection, cells were trypsinized and suspended in antibiotic-free DMEM containing 10% FBS at a concentration of 10⁵ cells per mL.

[0195] To transfect the dsRNA, the dsRNA was formulated in OPTI-MEM I reduced serum medium (Gibco® Invitrogen, Carlsbad, Calif.) and placed in multiwell plates. Then Lipofectamine™ RNAiMAX (Invitrogen) was mixed with OPTI-MEM per manufacture's specifications, added to each well containing dsRNA, mixed manually, and incubated at room temperature for 10-20 minutes. Then 30 μL of vector-transfected HeLa cells at 10⁵ cells per mL were added to each well (final dsRNA concentration of 25 nM), the plates were spun for 30 seconds at 1,000 rpm, and then incubated at 37° C./5% CO₂ for 2 days. The Cell Titer Blue (CTB) reagent (Promega, Madison, Wis.) was used to assay for cell viability and proliferation—none of the dsRNA showed any substantial toxicity.

[0196] After transfecting, the media and CTB reagent were removed and the wells washed once with 100 PBS. Cells were assayed for firefly and Renilla luciferase reporter activity by first adding Dual-Glo™ Luciferase Reagent (Promega, Madison, Wis.) for 10 minutes with shaking, and then quantitating the luminescent signal on a VICTOR³™ 1420 Multilabel Counter (PerkinElmer). After measuring the firefly luminescence, Stop & Glo® Reagent (Promega, Madison, Wis.) was added for 10 minutes with shaking to simultaneously quench the firefly reaction and initiate the Renilla luciferase reaction, which was then quantitated on a VICTOR³™ 1420 Multilabel Counter (PerkinElmer). The results are presented in Table 1.

TABLE 1
Gene Silencing Activity* of dsRNA Dicer Substrate and mdRNA (nicked or gapped) Dicer Substrate

| | | | Dicer | Dicer | | Nicked | | | | | | |
|---|---|---|---|---|---|---|---|---|---|---|---|---|
| | | | SEQ ID | Mean | Dicer | SEQ ID | Nicked | Nicked | Gapped | Gapped | Gapped | Length |
| Set | Target | Pos† | NOS‡ | (%) | 95% CI | NOS | Mean (%) | 95% CI | SEQ ID NOS | Mean (%) | 95% CI | 5′-S\hat{ } |
| 1 | AKT1 | 1862 | 63, 283 | 20.6 | 4.0% | 503, 723, 283 | 23.5 | 5.7% | 503, 940, 283 | 54.3 | 12.0% | 14 |
| 2 | AKT1 | 1883 | 64, 284 | 29.7 | 7.3% | 504, 724, 284 | 51.4 | 6.7% | 504, 941, 284 | 76.9 | 19.5% | 12 |
| 3 | AKT1 | 2178 | 65, 285 | 15.4 | 2.4% | 505, 725, 285 | 22.3 | 6.4% | 505, 942, 285 | 24.4 | 5.1% | 14 |
| 4 | AKT1 | 2199 | 66, 286 | 26.4 | 3.6% | 506, 726, 286 | 62.7 | 6.6% | 506, 943, 286 | 66.8 | 10.8% | 15 |
| 5 | AKT1 | 2264 | 67, 287 | 35.2 | 7.3% | 507, 727, 287 | 34.1 | 7.3% | 507, 944, 287 | 31.3 | 5.2% | 12 |
| 6 | AKT1 | 2580 | 68, 288 | 27.6 | 5.7% | 508, 728, 288 | 40.1 | 8.3% | 508, 945, 288 | 91.5 | 17.0% | 12 |
| 7 | AKT1 | 2606 | 69, 289 | 14.0 | 2.6% | 509, 729, 289 | 14.9 | 3.2% | 509, 946, 289 | 33.4 | 6.9% | 11 |
| 8 | AKT1 | 2629 | 70, 290 | 21.0 | 10.1% | 510, 730, 290 | 13.5 | 2.4% | 510, 947, 290 | 13.6 | 2.1% | 12 |
| 9 | AKT1 | 2661 | 71, 291 | 37.4 | 6.6% | 511, 731, 291 | 41.0 | 12.1% | 511, 948, 291 | 71.6 | 11.9% | 15 |
| 10 | AKT1 | 2663 | 72, 292 | 18.1 | 4.3% | 512, 732, 292 | 23.0 | 5.9% | 512, 949, 292 | 51.4 | 9.2% | 14 |
| 11 | BCR-ABL (b2a2) | 66 | 73, 293 | 16.9 | 5.9% | 513, 733, 293 | 30.4 | 10.5% | 513, 950, 293 | 38.2 | 11.7% | 13 |
| 12 | BCR-ABL (b2a2) | 190 | 74, 294 | 40.0 | 11.6% | 514, 734, 294 | 22.0 | 6.4% | 514, 951, 294 | 34.6 | 12.0% | 14 |
| 13 | BCR-ABL (b2a2) | 282 | 75, 295 | 24.2 | 5.2% | 515, 735, 295 | 37.6 | 8.2% | 515, 952, 295 | 34.6 | 8.6% | 13 |
| 14 | BCR-ABL (b2a2) | 284 | 76, 296 | 50.9 | 6.9% | 516, 736, 296 | 38.3 | 7.8% | 516, 953, 296 | 68.3 | 18.0% | 13 |
| 15 | BCR-ABL (b2a2) | 287 | 77, 297 | 45.5 | 13.2% | 517, 737, 297 | 39.6 | 11.5% | 517, 954, 297 | 75.2 | 17.2% | 14 |
| 16 | BCR-ABL (b2a2) | 289 | 78, 298 | 36.9 | 7.7% | 518, 738, 298 | 40.0 | 8.9% | 518, 955, 298 | 60.9 | 12.3% | 14 |
| 17 | BCR-ABL (b2a2) | 293 | 79, 299 | 55.9 | 9.8% | 519, 739, 299 | 58.6 | 14.7% | 519, 956, 299 | 87.0 | 14.3% | 13 |
| 18 | BCR-ABL (b2a2) | 461 | 80, 300 | 38.4 | 9.4% | 520, 740, 300 | 35.9 | 12.1% | 520, 957, 300 | 28.6 | 10.2% | 13 |
| 19 | BCR-ABL (b2a2) | 462 | 81, 301 | 31.1 | 13.7% | 521, 741, 301 | 26.5 | 5.5% | 521, 958, 301 | 35.8 | 10.7% | 14 |
| 20 | BCR-ABL (b2a2) | 561 | 82, 302 | 17.7 | 3.4% | 522, 742, 302 | 20.7 | 3.4% | 522, 959, 302 | 35.5 | 10.6% | 12 |
| 21 | BCR-ABL (b3a2) | 352 | 83, 303 | 45.4 | 7.0% | 523, 743, 303 | 39.8 | 8.3% | 523, 960, 303 | 45.5 | 11.0% | 12 |
| 22 | BCR-ABL (b3a2) | 353 | 84, 304 | 22.6 | 1.8% | 524, 744, 304 | 20.5 | 5.1% | 524, 961, 304 | 66.1 | 17.8% | 12 |
| 23 | BCR-ABL (b3a2) | 356 | 85, 305 | 11.9 | 2.5% | 525, 745, 305 | 28.4 | 5.8% | 525, 962, 305 | 56.0 | 10.6% | 13 |
| 24 | BCR-ABL (b3a2) | 357 | 86, 306 | 24.5 | 6.0% | 526, 746, 306 | 25.6 | 7.5% | 526, 963, 306 | 39.2 | 10.0% | 13 |
| 25 | BCR-ABL (b3a2) | 359 | 87, 307 | 56.8 | 9.3% | 527, 747, 307 | 42.4 | 7.3% | 527, 964, 307 | 46.4 | 9.5% | 13 |
| 26 | BCR-ABL (b3a2) | 360 | 88, 308 | 32.3 | 5.0% | 528, 748, 308 | 37.2 | 7.3% | 528, 965, 308 | 55.3 | 13.8% | 13 |
| 27 | BCR-ABL (b3a2) | 362 | 89, 309 | 12.4 | 3.2% | 529, 737, 309 | 26.3 | 9.8% | 529, 954, 309 | 46.2 | 8.3% | 14 |
| 28 | BCR-ABL (b3a2) | 410 | 90, 310 | 66.2 | 12.2% | 530, 749, 310 | 55.9 | 11.2% | 530, 966, 310 | 58.4 | 16.4% | 12 |
| 29 | BCR-ABL (b3a2) | 629 | 91, 311 | 35.0 | 11.7% | 531, 750, 311 | 46.5 | 10.1% | 531, 967, 311 | 41.0 | 9.0% | 13 |
| 30 | BCR-ABL (b3a2) | 727 | 92, 312 | 83.4 | 13.6% | 532, 751, 312 | 76.7 | 22.5% | 532, 968, 312 | 62.9 | 10.9% | 12 |
| 31 | EGFR | 4715 | 93, 313 | 15.3 | 2.2% | 533, 752, 313 | 9.4 | 0.9% | 533, 969, 313 | 11.3 | 1.7% | 11 |
| 32 | EGFR | 4759 | 94, 314 | 3.8 | 0.4% | 534, 753, 314 | 6.3 | 0.8% | 534, 970, 314 | 8.4 | 1.1% | 12 |
| 33 | EGFR | 4810 | 95, 315 | 5.2 | 0.6% | 535, 754, 315 | 5.8 | 0.7% | 535, 971, 315 | 7.2 | 1.0% | 13 |
| 34 | EGFR | 5249 | 96, 316 | 2.6 | 0.4% | 536, 755, 316 | 16.6 | 1.8% | 536, 972, 316 | 42.9 | 3.5% | 14 |
| 35 | EGFR | 5279 | 97, 317 | 7.6 | 1.0% | 537, 756, 317 | 10.6 | 1.1% | 537, 973, 317 | 11.8 | 1.7% | 13 |
| 36 | EGFR | 5374 | 98, 318 | 9.6 | 1.0% | 538, 757, 318 | 8.7 | 0.9% | 538, 974, 318 | 34.7 | 4.3% | 12 |
| 37 | EGFR | 5442 | 99, 319 | 4.1 | 0.8% | 539, 758, 319 | 15.1 | 1.8% | 539, 975, 319 | 19.7 | 2.4% | 12 |
| 38 | EGFR | 5451 | 100, 320 | 5.1 | 0.3% | 540, 759, 320 | 11.5 | 1.3% | 540, 976, 320 | 16.5 | 3.0% | 13 |
| 39 | EGFR | 5469 | 101, 321 | 5.6 | 0.8% | 541, 760, 321 | 5.1 | 0.5% | 541, 977, 321 | 12.2 | 2.5% | 13 |
| 40 | EGFR | 5483 | 102, 322 | 2.2 | 0.4% | 542, 761, 322 | 2.4 | 0.5% | 542, 978, 322 | 6.1 | 0.7% | 9 |
| 41 | FLT1 | 863 | 103, 323 | 7.6 | 1.1% | 543, 762, 323 | 10.2 | 3.3% | 543, 979, 323 | 29.2 | 8.1% | 12 |
| 42 | FLT1 | 906 | 104, 324 | 10.0 | 2.4% | 544, 763, 324 | 10.8 | 0.8% | 544, 980, 324 | 12.4 | 2.1% | 12 |
| 43 | FLT1 | 993 | 105, 325 | 12.2 | 2.5% | 545, 764, 325 | 13.7 | 2.8% | 545, 981, 325 | 20.0 | 11.3% | 13 |
| 44 | FLT1 | 1283 | 106, 326 | 19.6 | 4.5% | 546, 765, 326 | 25.8 | 7.3% | 546, 982, 326 | 18.7 | 6.5% | 12 |
| 45 | FLT1 | 1289 | 107, 327 | 15.5 | 2.0% | 547, 766, 327 | 13.5 | 1.6% | 547, 983, 327 | 22.5 | 5.0% | 12 |
| 46 | FLT1 | 1349 | 108, 328 | 36.8 | 4.2% | 548, 767, 328 | 22.9 | 4.0% | 548, 984, 328 | 52.7 | 5.4% | 14 |
| 47 | FLT1 | 1354 | 109, 329 | 36.6 | 4.0% | 549, 768, 329 | 49.7 | 5.9% | 549, 985, 329 | 45.8 | 9.3% | 14 |
| 48 | FLT1 | 1448 | 110, 330 | 9.3 | 2.5% | 550, 769, 330 | 16.1 | 2.9% | 550, 986, 330 | 24.2 | 3.6% | 13 |
| 49 | FLT1 | 1459 | 111, 331 | 13.7 | 3.6% | 551, 770, 331 | 20.0 | 8.7% | 551, 987, 331 | 22.4 | 4.4% | 12 |
| 50 | FLT1 | 1700 | 112, 332 | 7.9 | 2.2% | 552, 771, 332 | 11.2 | 3.7% | 552, 988, 332 | 36.4 | 8.0% | 13 |
| 51 | FRAP1 | 7631 | 113, 333 | 9.5 | 2.7% | 553, 772, 333 | 23.3 | 4.9% | 553, 989, 333 | 61.8 | 18.3% | 13 |
| 52 | FRAP1 | 7784 | 114, 334 | 15.1 | 1.7% | 554, 773, 334 | 19.9 | 2.8% | 554, 990, 334 | 29.3 | 3.4% | 12 |
| 53 | FRAP1 | 7812 | 115, 335 | 11.9 | 2.9% | 555, 774, 335 | 14.4 | 3.2% | 555, 991, 335 | 28.3 | 12.7% | 11 |
| 54 | FRAP1 | 7853 | 116, 336 | 16.8 | 3.3% | 556, 775, 336 | 24.1 | 3.7% | 556, 992, 336 | 67.5 | 9.2% | 11 |
| 55 | FRAP1 | 8018 | 117, 337 | 41.1 | 9.1% | 557, 776, 337 | 19.8 | 3.3% | 557, 993, 337 | 41.8 | 9.6% | 12 |
| 56 | FRAP1 | 8102 | 118, 338 | 35.7 | 5.1% | 558, 777, 338 | 30.2 | 6.3% | 558, 994, 338 | 39.5 | 9.9% | 12 |
| 57 | FRAP1 | 8177 | 119, 339 | 21.2 | 3.9% | 559, 778, 339 | 33.2 | 9.3% | 559, 995, 339 | 47.3 | 12.3% | 14 |
| 58 | FRAP1 | 8348 | 120, 340 | 25.8 | 3.6% | 560, 779, 340 | 26.8 | 4.4% | 560, 996, 340 | 37.4 | 4.7% | 11 |
| 59 | FRAP1 | 8435 | 121, 341 | 41.1 | 6.7% | 561, 780, 341 | 54.1 | 9.5% | 561, 997, 341 | 74.9 | 8.5% | 12 |
| 60 | FRAP1 | 8542 | 122, 342 | 23.1 | 4.8% | 562, 781, 342 | 16.5 | 5.5% | 562, 998, 342 | 33.6 | 6.4% | 10 |
| 61 | HIF1A | 1780 | 123, 343 | 76.6 | 14.9% | 563, 782, 343 | 89.2 | 11.9% | 563, 999, 343 | 86.3 | 9.3% | 12 |
| 62 | HIF1A | 1831 | 124, 344 | 9.0 | 0.6% | 564, 783, 344 | 14.0 | 2.3% | 564, 1000, 344 | 38.2 | 8.5% | 12 |
| 63 | HIF1A | 1870 | 125, 345 | 21.4 | 4.5% | 565, 784, 345 | 21.2 | 3.3% | 565, 1001, 345 | 19.6 | 2.2% | 13 |
| 64 | HIF1A | 1941 | 126, 346 | 8.9 | 2.1% | 566, 785, 346 | 11.4 | 2.2% | 566, 1002, 346 | 11.7 | 2.5% | 12 |
| 65 | HIF1A | 2068 | 127, 347 | 7.8 | 1.5% | 567, 786, 347 | 7.0 | 1.4% | 567, 1003, 347 | 16.9 | 3.9% | 12 |
| 66 | HIF1A | 2133 | 128, 348 | 13.0 | 2.0% | 568, 787, 348 | 16.7 | 3.1% | 568, 1004, 348 | 16.3 | 3.1% | 10 |
| 67 | HIF1A | 2232 | 129, 349 | 8.6 | 2.0% | 569, 788, 349 | 17.4 | 3.6% | 569, 1005, 349 | 37.8 | 9.6% | 13 |
| 68 | HIF1A | 2273 | 130, 350 | 19.1 | 5.3% | 570, 789, 350 | 23.4 | 4.4% | 570, 1006, 350 | 20.3 | 3.4% | 12 |
| 69 | HIF1A | 2437 | 131, 351 | 8.2 | 1.4% | 571, 790, 351 | 47.7 | 11.5% | 571, 1007, 351 | 72.4 | 14.3% | 13 |
| 70 | HIF1A | 2607 | 132, 352 | 8.0 | 2.1% | 572, 791, 352 | 11.0 | 1.2% | 572, 1008, 352 | 33.6 | 6.0% | 13 |
| 71 | IL17A | 923 | 133, 353 | 5.0 | 0.6% | 573, 792, 353 | 7.3 | 0.7% | 573, 1009, 353 | 26.3 | 2.5% | 12 |
| 72 | IL17A | 962 | 134, 354 | 6.7 | 0.8% | 574, 793, 354 | 7.7 | 0.9% | 574, 1010, 354 | 8.9 | 2.0% | 13 |
| 73 | IL17A | 969 | 135, 355 | 8.9 | 1.7% | 575, 794, 355 | 17.1 | 1.6% | 575, 1011, 355 | 49.5 | 4.3% | 14 |
| 74 | IL17A | 1098 | 136, 356 | 7.2 | 1.3% | 576, 795, 356 | 10.0 | 2.4% | 576, 1012, 356 | 15.4 | 2.8% | 12 |
| 75 | IL17A | 1201 | 137, 357 | 14.1 | 2.2% | 577, 796, 357 | 13.4 | 1.1% | 577, 1013, 357 | 17.2 | 2.8% | 12 |
| 76 | IL17A | 1433 | 138, 358 | 107.1 | 9.7% | 578, 797, 358 | 111.5 | 10.4% | 578, 1014, 358 | 108.1 | 8.8% | 13 |
| 77 | IL17A | 1455 | 139, 359 | 115.4 | 11.1% | 579, 798, 359 | 120.8 | 8.7% | 579, 1015, 359 | 120.3 | 9.9% | 12 |
| 78 | IL17A | 1478 | 140, 360 | 82.7 | 6.3% | 580, 799, 360 | 87.6 | 5.0% | 580, 1016, 360 | 95.9 | 5.6% | 14 |
| 79 | IL17A | 1663 | 141, 361 | 140.2 | 7.8% | 581, 800, 361 | 125.9 | 9.8% | 581, 1017, 361 | 114.7 | 10.1% | 14 |
| 80 | IL17A | 1764 | 142, 362 | 114.3 | 9.2% | 582, 801, 362 | 109.4 | 2.9% | 582, 1018, 362 | 105.7 | 8.1% | 15 |
| 81 | IL18 | 210 | 143, 363 | 13.8 | 2.8% | 583, 802, 363 | 23.9 | 5.8% | 583, 1019, 363 | 21.4 | 5.7% | 14 |
| 82 | IL18 | 368 | 144, 364 | 22.5 | 1.8% | 584, 803, 364 | 21.0 | 2.0% | 584, 1020, 364 | 29.7 | 3.7% | 13 |
| 83 | IL18 | 479 | 145, 365 | 88.1 | 12.9% | 585, 804, 365 | 66.3 | 9.8% | 585, 1021, 365 | 80.0 | 16.8% | 14 |
| 84 | IL18 | 508 | 146, 366 | 8.0 | 1.9% | 586, 805, 366 | 15.7 | 3.5% | 586, 1022, 366 | 17.0 | 5.7% | 12 |
| 85 | IL18 | 521 | 147, 367 | 9.9 | 2.1% | 587, 806, 367 | 10.8 | 2.1% | 587, 1023, 367 | 18.4 | 3.3% | 11 |
| 86 | IL18 | 573 | 148, 368 | 18.6 | 4.7% | 588, 807, 368 | 24.8 | 7.6% | 588, 1024, 368 | 48.8 | 7.7% | 14 |
| 87 | IL18 | 605 | 149, 369 | 27.5 | 6.1% | 589, 808, 369 | 21.3 | 3.9% | 589, 1025, 369 | 14.9 | 2.7% | 13 |
| 88 | IL18 | 663 | 150, 370 | 5.3 | 1.0% | 590, 809, 370 | 8.2 | 1.5% | 590, 1026, 370 | 11.7 | 3.4% | 12 |
| 89 | IL18 | 785 | 151, 371 | 8.6 | 1.0% | 591, 810, 371 | 11.7 | 2.8% | 591, 1027, 371 | 21.1 | 9.1% | 12 |
| 90 | IL18 | 918 | 152, 372 | 13.9 | 1.6% | 592, 811, 372 | 15.0 | 3.0% | 592, 1028, 372 | 30.4 | 3.6% | 11 |
| 91 | IL6 | 24 | 153, 373 | 22.6 | 1.7% | 593, 812, 373 | 45.7 | 7.8% | 593, 1029, 373 | 47.8 | 4.5% | 13 |
| 92 | IL6 | 74 | 154, 374 | 52.5 | 12.6% | 594, 813, 374 | 56.4 | 7.1% | 594, 1030, 374 | 88.3 | 15.5% | 12 |
| 93 | IL6 | 160 | 155, 375 | 49.8 | 7.8% | 595, 814, 375 | 50.6 | 6.1% | 595, 1031, 375 | 68.3 | 9.4% | 14 |
| 94 | IL6 | 370 | 156, 376 | 44.7 | 8.2% | 596, 815, 376 | 52.5 | 4.2% | 596, 1032, 376 | 74.3 | 9.3% | 13 |
| 95 | IL6 | 451 | 157, 377 | 39.3 | 5.0% | 597, 816, 377 | 35.6 | 4.1% | 597, 1033, 377 | 66.6 | 7.1% | 13 |
| 96 | IL6 | 481 | 158, 378 | 68.3 | 8.1% | 598, 817, 378 | 78.7 | 15.6% | 598, 1034, 378 | 63.2 | 6.2% | 11 |
| 97 | IL6 | 710 | 159, 379 | 29.2 | 4.2% | 599, 818, 379 | 32.0 | 4.1% | 599, 1035, 379 | 77.3 | 11.4% | 12 |
| 98 | IL6 | 822 | 160, 380 | 73.7 | 11.0% | 600, 819, 380 | 72.2 | 11.6% | 600, 1036, 380 | 85.2 | 13.3% | 12 |
| 99 | IL6 | 836 | 161, 381 | 98.8 | 21.8% | 601, 820, 381 | 95.0 | 13.2% | 601, 1037, 381 | 90.5 | 15.6% | 13 |
| 100 | IL6 | 960 | 162, 382 | 31.1 | 4.4% | 602, 821, 382 | 20.5 | 6.1% | 602, 1038, 382 | 25.6 | 2.4% | 12 |
| 101 | MAP2K1 | 1237 | 163, 383 | 21.0 | 3.3% | 603, 822, 383 | 27.9 | 3.8% | 603, 1039, 383 | 50.0 | 8.8% | 11 |
| 102 | MAP2K1 | 1342 | 164, 384 | 3.9 | 0.5% | 604, 823, 384 | 8.7 | 1.5% | 604, 1040, 384 | 11.4 | 1.3% | 13 |
| 103 | MAP2K1 | 1501 | 165, 385 | 12.9 | 1.9% | 605, 824, 385 | 19.4 | 2.9% | 605, 1041, 385 | 19.7 | 5.3% | 12 |
| 104 | MAP2K1 | 1542 | 166, 386 | 7.2 | 1.3% | 606, 825, 386 | 11.7 | 2.1% | 606, 1042, 386 | 18.7 | 3.2% | 11 |
| 105 | MAP2K1 | 1544 | 167, 387 | 13.1 | 2.1% | 607, 826, 387 | 11.1 | 1.1% | 607, 1043, 387 | 16.5 | 3.0% | 10 |
| 106 | MAP2K1 | 1728 | 168, 388 | 11.9 | 1.7% | 608, 827, 388 | 11.9 | 1.0% | 608, 1044, 388 | 27.9 | 4.3% | 13 |
| 107 | MAP2K1 | 1777 | 169, 389 | 18.3 | 2.8% | 609, 828, 389 | 37.2 | 4.3% | 609, 1045, 389 | 64.5 | 8.5% | 13 |
| 108 | MAP2K1 | 1892 | 170, 390 | 34.5 | 4.7% | 610, 829, 390 | 37.6 | 6.8% | 610, 1046, 390 | 42.4 | 7.3% | 12 |
| 109 | MAP2K1 | 1954 | 171, 391 | 4.6 | 0.5% | 611, 830, 391 | 4.2 | 0.5% | 611, 1047, 391 | 6.5 | 1.1% | 13 |
| 110 | MAP2K1 | 2062 | 172, 392 | 10.2 | 0.8% | 612, 831, 392 | 10.4 | 2.9% | 612, 1048, 392 | 12.2 | 2.0% | 12 |
| 111 | MAPK1 | 3683 | 173, 393 | 7.0 | 0.9% | 613, 614, 393 | 24.4 | 17.3% | 613, 1049, 393 | 25.2 | 2.6% | 12 |
| 112 | MAPK1 | 3695 | 174, 394 | 32.9 | 4.6% | 614, 832, 394 | 30.9 | 4.0% | 614, 1050, 394 | 33.8 | 3.1% | 13 |
| 113 | MAPK1 | 3797 | 175, 395 | 7.4 | 1.1% | 615, 833, 395 | 6.4 | 1.3% | 615, 1051, 395 | 40.4 | 5.8% | 11 |
| 114 | MAPK1 | 3905 | 176, 396 | 8.0 | 1.0% | 616, 834, 396 | 8.1 | 0.5% | 616, 1052, 396 | 14.8 | 1.4% | 12 |
| 115 | MAPK1 | 3916 | 177, 397 | 11.0 | 1.7% | 617, 835, 397 | 16.0 | 3.3% | 617, 1053, 397 | 45.5 | 8.1% | 10 |
| 116 | MAPK1 | 3943 | 178, 398 | 6.8 | 0.8% | 618, 836, 398 | 6.6 | 0.7% | 618, 1054, 398 | 11.0 | 2.3% | 10 |
| 117 | MAPK1 | 4121 | 179, 399 | 7.6 | 1.1% | 619, 837, 399 | 12.7 | 1.6% | 619, 1055, 399 | 25.1 | 3.1% | 12 |
| 118 | MAPK1 | 4256 | 180, 400 | 27.6 | 2.5% | 620, 838, 400 | 36.8 | 4.0% | 620, 1056, 400 | 57.7 | 7.0% | 13 |
| 119 | MAPK1 | 4294 | 181, 401 | 31.0 | 3.0% | 621, 839, 401 | 22.3 | 3.6% | 621, 1057, 401 | 50.9 | 4.6% | 12 |
| 120 | MAPK1 | 4375 | 182, 402 | 10.9 | 1.1% | 622, 840, 402 | 12.4 | 1.4% | 622, 1058, 402 | 16.9 | 2.7% | 11 |
| 121 | MAPK14 | 2715 | 183, 403 | 11.4 | 2.8% | 623, 841, 403 | 16.5 | 4.1% | 623, 1059, 403 | 16.6 | 2.4% | 12 |
| 122 | MAPK14 | 2737 | 184, 404 | 7.5 | 0.8% | 624, 842, 404 | 10.3 | 1.1% | 624, 1060, 404 | 13.1 | 1.2% | 11 |
| 123 | MAPK14 | 2750 | 185, 405 | 8.7 | 1.0% | 625, 843, 405 | 12.2 | 1.8% | 625, 1061, 405 | 15.8 | 1.9% | 13 |
| 124 | MAPK14 | 2817 | 186, 406 | 6.4 | 0.8% | 626, 844, 406 | 14.6 | 1.7% | 626, 1062, 406 | 19.4 | 2.0% | 11 |
| 125 | MAPK14 | 3091 | 187, 407 | 9.9 | 0.6% | 627, 845, 407 | 10.3 | 1.3% | 627, 1063, 407 | 24.7 | 1.5% | 11 |
| 126 | MAPK14 | 3312 | 188, 408 | 20.4 | 1.8% | 628, 846, 408 | 30.5 | 2.9% | 628, 1064, 408 | 38.5 | 3.4% | 13 |
| 127 | MAPK14 | 3346 | 189, 409 | 20.9 | 1.6% | 629, 847, 409 | 23.0 | 2.6% | 629, 1065, 409 | 58.3 | 6.7% | 11 |
| 128 | MAPK14 | 3531 | 190, 410 | 42.4 | 3.2% | 630, 848, 410 | 55.1 | 5.0% | 630, 1066, 410 | 61.9 | 3.6% | 12 |
| 129 | MAPK14 | 3621 | 191, 411 | 28.6 | 1.9% | 631, 849, 411 | 42.4 | 13.5% | 631, 1067, 411 | 71.9 | 5.2% | 11 |
| 130 | MAPK14 | 3680 | 192, 412 | 15.6 | 1.3% | 632, 850, 412 | 15.5 | 1.9% | 632, 1068, 412 | 19.8 | 2.1% | 12 |
| 131 | PDGFA | 1322 | 193, 413 | 23.7 | 3.6% | 633, 851, 413 | 31.6 | 4.3% | 633, 1069, 413 | 38.4 | 3.3% | 12 |
| 132 | PDGFA | 1332 | 194, 414 | 35.5 | 5.4% | 634, 852, 414 | 48.4 | 3.0% | 634, 1070, 414 | 65.4 | 10.5% | 14 |
| 133 | PDGFA | 1395 | 195, 415 | 25.9 | 3.3% | 635, 853, 415 | 40.2 | 6.0% | 635, 1071, 415 | 55.2 | 9.8% | 14 |
| 134 | PDGFA | 1669 | 196, 416 | 40.4 | 5.1% | 636, 854, 416 | 29.5 | 4.3% | 636, 1072, 416 | 33.9 | 5.9% | 12 |
| 135 | PDGFA | 1676 | 197, 417 | 27.1 | 2.5% | 637, 855, 417 | 36.8 | 4.5% | 637, 1073, 417 | 47.4 | 3.4% | 13 |
| 136 | PDGFA | 1748 | 198, 418 | 27.4 | 4.7% | 638, 856, 418 | 34.5 | 5.0% | 638, 1074, 418 | 47.5 | 4.7% | 11 |
| 137 | PDGFA | 2020 | 199, 419 | 31.6 | 6.6% | 639, 857, 419 | 37.5 | 4.3% | 639, 1075, 419 | 51.9 | 5.0% | 13 |
| 138 | PDGFA | 2021 | 200, 420 | 16.7 | 1.0% | 640, 858, 420 | 24.2 | 3.1% | 640, 1076, 420 | 62.6 | 6.9% | 14 |
| 139 | PDGFA | 2030 | 201, 421 | 38.7 | 6.2% | 641, 859, 421 | 47.0 | 10.5% | 641, 1077, 421 | 80.5 | 7.6% | 13 |
| 140 | PDGFA | 2300 | 202, 422 | 55.3 | 7.7% | 642, 860, 422 | 41.2 | 4.7% | 642, 1078, 422 | 71.7 | 9.1% | 15 |
| 141 | PDGFRA | 4837 | 203, 423 | 16.9 | 3.1% | 643, 861, 423 | 21.1 | 5.1% | 643, 1079, 423 | 23.1 | 4.8% | 12 |
| 142 | PDGFRA | 4900 | 204, 424 | 23.8 | 3.8% | 644, 862, 424 | 40.9 | 8.4% | 644, 1080, 424 | 62.5 | 12.5% | 16 |
| 143 | PDGFRA | 5007 | 205, 425 | 52.6 | 9.4% | 645, 863, 425 | 49.6 | 7.7% | 645, 1081, 425 | 47.0 | 9.5% | 12 |
| 144 | PDGFRA | 5043 | 206, 426 | 30.1 | 7.9% | 646, 864, 426 | 30.0 | 5.4% | 646, 1082, 426 | 57.3 | 7.8% | 11 |
| 145 | PDGFRA | 5082 | 207, 427 | 8.3 | 1.1% | 647, 865, 427 | 11.9 | 1.8% | 647, 1083, 427 | 18.2 | 4.0% | 13 |
| 146 | PDGFRA | 5352 | 208, 428 | 6.3 | 1.4% | 648, 866, 428 | 8.2 | 1.6% | 648, 1084, 428 | 7.9 | 1.1% | 12 |
| 147 | PDGFRA | 5367 | 209, 429 | 19.1 | 5.6% | 649, 867, 429 | 10.9 | 1.6% | 649, 1085, 429 | 25.1 | 2.9% | 14 |
| 148 | PDGFRA | 5496 | 210, 430 | 18.9 | 5.4% | 650, 868, 430 | 17.0 | 2.9% | 650, 1086, 430 | 17.8 | 4.0% | 12 |
| 149 | PDGFRA | 5706 | 211, 431 | 24.5 | 4.0% | 651, 869, 431 | 47.8 | 4.3% | 651, 1087, 431 | 50.6 | 5.5% | 13 |
| 150 | PDGFRA | 5779 | 212, 432 | 13.0 | 1.4% | 652, 870, 432 | 14.0 | 2.1% | 652, 1088, 432 | 17.2 | 4.3% | 14 |
| 151 | PIK3CA | 213 | 213, 433 | 4.3 | 1.0% | 653, 871, 433 | 3.7 | 0.6% | 653, 1089, 433 | 5.7 | 0.9% | 12 |
| 152 | PIK3CA | 389 | 214, 434 | 5.3 | 1.0% | 654, 872, 434 | 7.0 | 1.5% | 654, 1090, 434 | 5.6 | 1.5% | 10 |
| 153 | PIK3CA | 517 | 215, 435 | 9.6 | 1.1% | 655, 873, 435 | 11.5 | 2.1% | 655, 1091, 435 | 13.5 | 1.6% | 11 |
| 154 | PIK3CA | 630 | 216, 436 | 6.1 | 1.2% | 656, 874, 436 | 8.9 | 2.6% | 656, 1092, 436 | 9.3 | 1.8% | 12 |
| 155 | PIK3CA | 680 | 217, 437 | 3.8 | 0.3% | 657, 875, 437 | 5.9 | 0.6% | 657, 1093, 437 | 6.9 | 1.0% | 11 |
| 156 | PIK3CA | 732 | 218, 438 | 5.7 | 1.7% | 658, 876, 438 | 15.3 | 1.5% | 658, 1094, 438 | 17.4 | 4.0% | 11 |
| 157 | PIK3CA | 736 | 219, 439 | 5.9 | 0.9% | 659, 877, 439 | 7.8 | 1.1% | 659, 1095, 439 | 6.5 | 1.4% | 12 |
| 158 | PIK3CA | 923 | 220, 440 | 5.0 | 0.7% | 660, 878, 440 | 8.5 | 1.5% | 660, 1096, 440 | 7.4 | 0.6% | 12 |
| 159 | PIK3CA | 1087 | 221, 441 | 8.1 | 2.3% | 661, 879, 441 | 8.5 | 1.6% | 661, 1097, 441 | 17.5 | 4.9% | 12 |
| 160 | PIK3CA | 1094 | 222, 442 | 13.0 | 3.8% | 662, 880, 442 | 13.0 | 2.5% | 662, 1098, 442 | 30.1 | 6.4% | 11 |
| 161 | PKN3 | 2408 | 223, 443 | 9.4 | 2.1% | 663, 881, 443 | 15.2 | 3.7% | 663, 665, 443 | 32.1 | 6.6% | 12 |
| 162 | PKN3 | 2420 | 224, 444 | 14.5 | 1.7% | 664, 882, 444 | 30.4 | 7.5% | 664, 1099, 444 | 40.1 | 6.7% | 12 |
| 163 | PKN3 | 2421 | 225, 445 | 15.2 | 2.0% | 665, 883, 445 | 20.6 | 2.7% | 665, 1100, 445 | 50.8 | 7.8% | 12 |
| 164 | PKN3 | 2425 | 226, 446 | 28.4 | 3.8% | 666, 884, 446 | 27.0 | 6.9% | 666, 1101, 446 | 36.2 | 4.8% | 15 |
| 165 | PKN3 | 2682 | 227, 447 | 30.0 | 4.6% | 667, 885, 447 | 27.1 | 2.8% | 667, 1102, 447 | 37.1 | 6.2% | 11 |
| 166 | PKN3 | 2683 | 228, 448 | 22.4 | 2.8% | 668, 886, 448 | 34.8 | 2.2% | 668, 1103, 448 | 51.9 | 7.4% | 12 |
| 167 | PKN3 | 2931 | 229, 449 | 35.1 | 4.4% | 669, 887, 449 | 57.3 | 7.8% | 669, 1104, 449 | 88.6 | 7.1% | 13 |
| 168 | PKN3 | 3063 | 230, 450 | 21.8 | 3.1% | 670, 888, 450 | 28.6 | 8.5% | 670, 1105, 450 | 40.5 | 6.2% | 12 |
| 169 | PKN3 | 3314 | 231, 451 | 9.7 | 1.8% | 671, 889, 451 | 12.0 | 1.4% | 671, 1106, 451 | 17.3 | 1.3% | 10 |
| 170 | PKN3 | 3315 | 232, 452 | 10.1 | 1.3% | 672, 890, 452 | 15.3 | 2.8% | 672, 1107, 452 | 37.4 | 3.6% | 11 |
| 171 | RAF1 | 1509 | 233, 453 | 46.2 | 9.4% | 673, 891, 453 | 51.3 | 10.7% | 673, 1108, 453 | 61.3 | 4.4% | 12 |
| 172 | RAF1 | 1512 | 234, 454 | 40.1 | 9.7% | 674, 892, 454 | 34.5 | 5.6% | 674, 1109, 454 | 62.4 | 8.6% | 13 |
| 173 | RAF1 | 1628 | 235, 455 | 48.3 | 7.9% | 675, 893, 455 | 47.4 | 7.1% | 675, 1110, 455 | 41.1 | 5.1% | 12 |
| 174 | RAF1 | 1645 | 236, 456 | 38.9 | 2.3% | 676, 894, 456 | 62.1 | 9.0% | 676, 1111, 456 | 85.0 | 9.3% | 13 |
| 175 | RAF1 | 1780 | 237, 457 | 22.6 | 4.9% | 677, 895, 457 | 24.8 | 5.3% | 677, 1112, 457 | 37.6 | 10.4% | 12 |
| 176 | RAF1 | 1799 | 238, 458 | 23.2 | 3.1% | 678, 896, 458 | 43.6 | 7.6% | 678, 1113, 458 | 50.7 | 6.2% | 12 |
| 177 | RAF1 | 1807 | 239, 459 | 28.0 | 5.4% | 679, 897, 459 | 34.8 | 5.8% | 679, 1114, 459 | 37.0 | 5.3% | 15 |
| 178 | RAF1 | 1863 | 240, 460 | 28.2 | 3.1% | 680, 898, 460 | 38.1 | 4.5% | 680, 1115, 460 | 35.7 | 4.2% | 14 |
| 179 | RAF1 | 2157 | 241, 461 | 68.8 | 6.5% | 681, 899, 461 | 64.1 | 8.0% | 681, 1116, 461 | 86.7 | 12.6% | 14 |
| 180 | RAF1 | 2252 | 242, 462 | 11.4 | 1.7% | 682, 900, 462 | 25.8 | 5.4% | 682, 1117, 462 | 71.2 | 10.7% | 13 |
| 181 | SRD5A1 | 1150 | 243, 463 | 3.7 | 0.5% | 683, 901, 463 | 4.4 | 0.7% | 683, 1118, 463 | 3.8 | 0.4% | 12 |
| 182 | SRD5A1 | 1153 | 244, 464 | 3.2 | 0.4% | 684, 902, 464 | 5.2 | 0.5% | 684, 1119, 464 | 7.0 | 0.9% | 12 |
| 183 | SRD5A1 | 1845 | 245, 465 | 3.9 | 0.5% | 685, 903, 465 | 4.5 | 0.6% | 685, 1120, 465 | 7.4 | 0.8% | 13 |
| 184 | SRD5A1 | 1917 | 246, 466 | 9.4 | 0.8% | 686, 904, 466 | 10.2 | 1.3% | 686, 1121, 466 | 22.0 | 2.8% | 12 |
| 185 | SRD5A1 | 1920 | 247, 467 | 4.6 | 0.3% | 687, 905, 467 | 4.9 | 1.0% | 687, 1122, 467 | 6.4 | 0.5% | 11 |
| 186 | SRD5A1 | 1964 | 248, 468 | 6.2 | 0.7% | 688, 906, 468 | 10.4 | 0.7% | 688, 1123, 468 | 21.0 | 4.6% | 10 |
| 187 | SRD5A1 | 1981 | 249, 469 | 6.5 | 1.0% | 689, 907, 469 | 7.1 | 0.7% | 689, 1124, 469 | 8.8 | 1.5% | 12 |
| 188 | SRD5A1 | 2084 | 250, 470 | 16.9 | 1.1% | 690, 908, 470 | 15.7 | 1.5% | 690, 1125, 470 | 13.3 | 1.5% | 12 |
| 189 | SRD5A1 | 2085 | 251, 471 | 17.3 | 1.6% | 691, 909, 471 | 19.4 | 1.7% | 691, 1126, 471 | 20.8 | 2.6% | 12 |
| 190 | SRD5A1 | 2103 | 252, 472 | 7.5 | 1.3% | 692, 910, 472 | 10.9 | 1.2% | 692, 1127, 472 | 12.3 | 1.7% | 12 |
| 191 | TNF | 32 | 253, 473 | 71.4 | 13.2% | 693, 911, 473 | 93.7 | 14.9% | 693, 1128, 473 | 122.6 | 21.1% | 12 |
| 192 | TNF | 649 | 254, 474 | 100.0 | 16.3% | 694, 912, 474 | 127.7 | 12.6% | 694, 1129, 474 | 147.9 | 21.7% | 12 |
| 193 | TNF | 802 | 255, 475 | 67.2 | 10.7% | 695, 913, 475 | 64.0 | 6.6% | 695, 1130, 475 | 116.4 | 21.0% | 12 |
| 194 | TNF | 875 | 256, 476 | 101.7 | 19.9% | 696, 914, 476 | 99.3 | 15.5% | 696, 1131, 476 | 108.8 | 14.2% | 12 |
| 195 | TNF | 983 | 257, 477 | 94.5 | 7.0% | 697, 915, 477 | 83.1 | 7.3% | 697, 1132, 477 | 140.6 | 20.4% | 11 |
| 196 | TNF | 987 | 258, 478 | 82.0 | 10.9% | 698, 916, 478 | 139.4 | 8.2% | 698, 1133, 478 | 143.8 | 9.2% | 10 |
| 197 | TNF | 992 | 259, 479 | 126.7 | 15.8% | 699, 700, 479 | 121.7 | 10.8% | 699, 1134, 479 | 115.9 | 16.4% | 11 |
| 198 | TNF | 1003 | 260, 480 | 123.4 | 16.7% | 700, 917, 480 | 114.4 | 47.8% | 700, 1135, 480 | 98.5 | 17.2% | 14 |
| 199 | TNF | 1630 | 261, 481 | 58.0 | 5.7% | 701, 918, 481 | 56.1 | 9.4% | 701, 1136, 481 | 71.0 | 17.2% | 11 |
| 200 | TNF | 1631 | 262, 482 | 54.2 | 13.4% | 702, 919, 482 | 63.9 | 10.1% | 702, 1137, 482 | 73.8 | 14.8% | 11 |
| 201 | TNFSF13B | 188 | 263, 483 | 20.4 | 3.2% | 703, 920, 483 | 46.2 | 11.9% | 703, 1138, 483 | 58.4 | 12.7% | 13 |
| 202 | TNFSF13B | 313 | 264, 484 | 15.9 | 5.1% | 704, 921, 484 | 18.9 | 7.4% | 704, 1139, 484 | 48.0 | 8.1% | 12 |
| 203 | TNFSF13B | 337 | 265, 485 | 22.3 | 4.6% | 705, 922, 485 | 37.1 | 11.0% | 705, 1140, 485 | 63.6 | 10.4% | 12 |
| 204 | TNFSF13B | 590 | 266, 486 | 35.8 | 8.7% | 706, 923, 486 | 49.4 | 11.0% | 706, 1141, 486 | 50.7 | 10.3% | 10 |
| 205 | TNFSF13B | 652 | 267, 487 | 21.3 | 7.2% | 707, 924, 487 | 57.6 | 16.7% | 707, 1142, 487 | 78.8 | 5.6% | 14 |
| 206 | TNFSF13B | 661 | 268, 488 | 28.8 | 3.0% | 708, 925, 488 | 38.3 | 8.4% | 708, 1143, 488 | 56.5 | 16.3% | 12 |
| 207 | TNFSF13B | 684 | 269, 489 | 46.3 | 7.2% | 709, 926, 489 | 43.8 | 9.7% | 709, 1144, 489 | 54.5 | 4.6% | 12 |
| 208 | TNFSF13B | 905 | 270, 490 | 18.5 | 5.0% | 710, 927, 490 | 27.9 | 3.1% | 710, 1145, 490 | 51.7 | 10.9% | 12 |
| 209 | TNFSF13B | 961 | 271, 491 | 21.4 | 4.0% | 711, 928, 491 | 37.5 | 10.1% | 711, 1146, 491 | 77.6 | 11.2% | 14 |
| 210 | TNFSF13B | 1150 | 272, 492 | 24.1 | 7.0% | 712, 929, 492 | 23.4 | 5.7% | 712, 1147, 492 | 35.9 | 8.0% | 13 |
| 211 | VEGFA | 1426 | 273, 493 | 14.5 | 2.2% | 713, 930, 493 | 18.1 | 3.2% | 713, 1148, 493 | 21.0 | 3.8% | 13 |
| 212 | VEGFA | 1428 | 274, 494 | 18.5 | 2.6% | 714, 931, 494 | 32.1 | 5.8% | 714, 1149, 494 | 46.7 | 9.4% | 12 |
| 213 | VEGFA | 1603 | 275, 495 | 14.6 | 2.1% | 715, 932, 495 | 36.6 | 17.5% | 715, 1150, 495 | 65.6 | 6.9% | 13 |
| 214 | VEGFA | 1685 | 276, 496 | 17.1 | 1.3% | 716, 933, 496 | 20.2 | 5.5% | 716, 1151, 496 | 23.4 | 3.8% | 13 |
| 215 | VEGFA | 1792 | 277, 497 | 17.0 | 1.8% | 717, 934, 497 | 21.2 | 3.2% | 717, 1152, 497 | 39.5 | 6.3% | 12 |
| 216 | VEGFA | 2100 | 278, 498 | 116.9 | 11.5% | 718, 935, 498 | 103.6 | 7.5% | 718, 1153, 498 | 101.5 | 12.9% | 12 |
| 217 | VEGFA | 2102 | 279, 499 | 116.3 | 9.1% | 719, 936, 499 | 110.2 | 9.3% | 719, 1154, 499 | 105.0 | 8.0% | 12 |
| 218 | VEGFA | 2196 | 280, 500 | 24.2 | 2.7% | 720, 937, 500 | 26.6 | 3.1% | 720, 1155, 500 | 43.5 | 3.5% | 12 |
| 219 | VEGFA | 2261 | 281, 501 | 15.6 | 2.2% | 721, 938, 501 | 44.2 | 6.2% | 721, 1156, 501 | 109.0 | 9.8% | 12 |
| 220 | VEGFA | 2292 | 282, 502 | 48.4 | 4.3% | 722, 939, 502 | 45.1 | 7.2% | 722, 1157, 502 | 80.7 | 6.7% | 15 |

*All samples were normalized to the respective dsRNA QNeg (Qiagen) negative control samples run in the same experiment. That is, QNeg values were set as 100% active (i.e., no knockdown), with 95% confidence intervals (CI) ranging from 6.3-22.5%. As a positive control, an siRNA specific for rLuc was used, which samples showed on average expression levels that varied from 1.2% to 16.8% (i.e., about 83% to about 99% knockdown activity and a 95% CI ranging from 0.3% to 13.7%).
†“Pos” refers to the position on the target gene mRNA message that aligns with the 5′-end of the dsRNA sense strand. The mRNA numbering is based on the GenBank accession numbers as described herein.
‡The SEQ ID NOS. are provided in the following order: (1) Dicer: sense strand, antisense strand; (2) Nicked: 5′-sense strand fragment, 3′-sense strand fragment, and antisense strand; and (3) Gapped: 5′-sense strand fragment, 3′-sense strand fragment, and antisense strand. The Dicer dsRNA has two strands, while ndsRNA and gdsRNA have three strands each. The nicked or gapped sense strand fragments have three locked nucleic acids each.
\hat{ }“Length 5′-S” refers to the length of the 5′-sense strand fragment of the nicked or gapped mdRNA, which indicates the position of the nick (e.g., 10 means the nick is between position 10 and 11, so the 5′sense strand fragment is 10 nucleotides long and the 3′-sense strand fragment is 15 nucelotides long) or one nucleotide gap (e.g., 10 means the missing nucleotide is number 11, so the 5′sense strand fragment is 10 nucleotides long and the 3′-sense strand fragment is 14 nucelotides long).

### Example 2

### Knockdown of β-Galactosidase Activity by Gapped dsRNA Dicer Substrate

[0197] The activity of a Dicer substrate dsRNA containing a gap in the double-stranded structure in silencing LacZ mRNA as compared to the normal Dicer substrate dsRNA (i.e., not having a gap) was examined.

Nucleotide Sequences of dsRNA and mdRNA Targeting LacZ mRNA

[0198] The nucleic acid sequence of the one or more sense strands, and the antisense strand of the dsRNA and gapped dsRNA (also referred to herein as a meroduplex or mdRNA) are shown below and were synthesized using standard techniques. The RISC activator LacZ dsRNA comprises a 21 nucleotide sense strand and a 21 nucleotide antisense strand, which can anneal to form a double-stranded region of 19 base pairs with a two deoxythymidine overhang on each strand (referred to as 21/21 dsRNA).

LacZ dsRNA (21/21)-RISC Activator

| | |
|---|---|
| Sense | |
| 5′-CUACACAAAUCAGCGAUUUdTdT-3′ | (SEQ ID NO:1) |
| Antisense | |
| 3′-dTdTGAUGUGUUUAGUCGCUAAA-5′ | (SEQ ID NO:2) |

[0199] The Dicer substrate LacZ dsRNA comprises a 25 nucleotide sense strand and a 27 nucleotide antisense strand, which can anneal to form a double-stranded region of 25 base pairs with one blunt end and a cytidine and uridine overhang on the other end (referred to as 25/27 dsRNA).

| | |
|---|---|
| LacZ dsRNA (25/27)-Dicer Substrate | |
| Sense | |
| 5′-CUACACAAAUCAGCGAUUUCCAUdGdT-3′ | (SEQ ID NO:3) |
| Antisense | |
| 3′-CUGAUGUGUUUAGUCGCUAAAGGUA C A-5′ | (SEQ ID NO:4) |

The LacZ mdRNA comprises two sense strands of 13 nucleotides (5′-portion) and 11 nucleotides (3′-portion) and a 27 nucleotide antisense strand, which three strands can anneal to form two double-stranded regions of 13 and 11 base pairs separated by a single nucleotide gap (referred to as a 13, 11/27 mdRNA). The 5′-end of the 11 nucleotide sense strand fragment may be optionally phosphorylated. The “*” indicates a gap—in this case, a single nucleotide gap (i.e., a cytidine is missing).

LacZ mdRNA (13, 11/27)-Dicer Substrate
Sense

(SEQ ID NOS:5, 6)

5′-CUACACAAAUCAG*GAUUUCCAUdGdT-3′
Antisense

(SEQ ID NO:4)

3′-CUGAUGUGUUUAGUCGCUAAAGGUA C A-5′

Each of the LacZ dsRNA or mdRNA was used to transfect 9lacZ/R cells.

### Transfection

[0200] Six well collagen-coated plates were seeded with 5×10⁵ 9lacZ/R cells/well in a 2 ml volume per well, and incubated overnight at 37° C./5% CO₂ in DMEM/high glucose media. Preparation for transfection: 250 μl of OPTIMEM media without serum was mixed with 5 μl of 20 pmol/μl dsRNA and 5 μl of HIPERFECT transfection solution (Qiagen) was mixed with another 250 μl OPTIMEM media. After both mixtures were allowed to equilibrate for 5 minutes, the RNA and transfection solutions were combined and left at room temperature for 20 minutes to form transfection complexes. The final concentration of HIPERFECT was 50 μM, and the dsRNAs were tested at 0.05 nM, 0.1 nM, 0.2 nM, 0.5 nM, 1 nM, 2 nM, 5 nM, and 10 nM, while the mdRNA was tested at 0.2 nM, 0.5 nM, 1 nM, 2 nM, 5 nM, 10 nM, 20 nM, and 50 nM. Complete media was removed, the cells were washed with incomplete OPTIMEM, and then 500 μl transfection mixture was applied to the cells, which were incubated with gentle shaking at 37° C. for 4 hours. After transfecting, the transfection media was removed, cells were washed once with complete DMEM/high glucose media, fresh media added, and the cells were then incubated for 48 hours at 37° C., 5% CO₂.

### β-Galactosidase Assay

[0201] Transfected cells were washed with PBS, and then detached with 0.5 ml trypsin/EDTA. The detached cells were suspended in 1 ml complete DMEM/high glucose and transferred to a clean tube. The cells were harvested by centrifugation at 250×g for 5 minutes, and then resuspended in 50 μl 1× lysis buffer at 4° C. The lysed cells were subjected to two freeze-thaw cycles on dry ice and a 37° C. water bath. The lysed samples were centrifuged for 5 minutes at 4° C. and the supernatant was recovered. For each sample, 1.5 μl and 10 μl of lysate was transferred to a clean tube and sterile water added to a final volume of 30 μl followed by the addition of 70 μl o-nitrophenyl-β-D-galactopyranose (ONPG) and 200 μl 1× cleavage buffer with β-mercaptoethanol. The samples were mixed briefly, incubated for 30 minutes at 37° C., and then 500 μl stop buffer was added (final volume 800 μl). β-Galactosidase activity for each sample was measured in disposable cuvettes at 420 nm. Protein concentration was determined by the BCA (bicinchoninic acid) method. For the purpose of the instant example, the level of measured LacZ activity was correlated with the quantity of LacZ transcript within 9L/LacZ cells. Thus, a reduction in β-galactosidase activity after dsRNA transfection, absent a negative impact on cell viability, was attributed to a reduction in the quantity of LacZ transcripts resulting from targeted degradation mediated by the LacZ dsRNA.

### Results

[0202] Knockdown activity in transfected and untransfected cells was normalized to a Qneg control dsRNA and presented as a normalized value of the Qneg control (i.e., Qneg represented 100% or “normal” gene expression levels). Both the lacZ RISC activator and Dicer substrate dsRNAs molecule showed good knockdown of β-galactosidase activity at concentration as low as 0.1 nM (FIG. 2), while the Dicer substrate antisense strand alone (single stranded 27mer) had no silencing effect. Surprisingly, a gapped mdRNA showed good knockdown although somewhat lower than that of intact RISC activator and Dicer substrate dsRNAs (FIG. 2). The presence of the gapmer cytidine (i.e., the missing nucleotide) at various concentrations (0.1 μM to 50 μM) had no effect on the activity of the mdRNA (data not shown). None of the dsRNA or mdRNA solutions showed any detectable toxicity in the transfected 9L/LacZ cells. The IC₅₀ of the lacZ mdRNA was calculated to be 3.74 nM, which is about 10 fold lower than what had been previously measured for lacZ dsRNA 21/21 (data not shown). These results show that a meroduplex (gapped dsRNA) is capable of inducing gene silencing.

### Example 3

### Knockdown of Influenza Gene Expression by Nicked dsRNA

[0203] The activity of a nicked dsRNA (21/21) in silencing influenza gene expression as compared to a normal dsRNA (i.e., not having a nick) was examined.

Nucleotide Sequences of dsRNA and mdRNA Targeting Influenza mRNA

[0204] The dsRNA and nicked dsRNA (another form of meroduplex, referred to herein as ndsRNA) are shown below and were synthesized using standard techniques. The RISC activator influenza G1498 dsRNA comprises a 21 nucleotide sense strand and a 21 nucleotide antisense strand, which can anneal to form a double-stranded region of 19 base pairs with a two deoxythymidine overhang on each strand.

| | |
|---|---|
| G1498-wt dsRNA (21/21) | |
| Sense | |
| 5′-GGAUCUUAUUUCUUCGGAGdTdT-3′ | (SEQ ID NO:7) |
| Antisense | |
| 3′-dTdTCCUAGAAUAAAGAAGCCUC-5′ | (SEQ ID NO:8) |

[0205] The RISC activator influenza G1498 dsRNA was nicked on the sense strand after nucleotide 11 to produce a ndsRNA having two sense strands of 11 nucleotides (5′-portion, italic) and 10 nucleotides (3′-portion) and a 21 nucleotide antisense strand, which three strands can anneal to form two double-stranded regions of 11 (shown in italics) and 10 base pairs separated by a one nucleotide gap (which may be referred to as G1498 11, 10/21 ndsRNA-wt). The 5′-end of the 10 nucleotide sense strand fragment may be optionally phosphorylated, as depicted by a “p” preceding the nucleotide (e.g., pC).

| | |
|---|---|
| G1498 ndsRNA-wt (11, 10/21) | |
| Sense | |
| 5′-GGAUCUUAUUUCUUCGGAGdTdT-3′ | (SEQ ID NO:9, 10) |
| Antisense | |
| 3′-dTdTCCUAGAAUAAAGAAGCCUC-5′ | (SEQ ID NO:8) |
| G1498 ndsRNA-wt (11, 10/21) | |
| Sense | |
| 5′-GGAUCUUAUUUpCUUCGGAGdTdT-3′ | (SEQ ID NOS:9, 10) |
| Antisense | |
| 3′-dTdTCCUAGAAUAAAGAAGCCUC-5′ | (SEQ ID NO: 8) |

In addition, each of these G1498 dsRNAs were made with each U substituted with a 5-methyluridine (ribothymidine) and are referred to as G1498 dsRNA-rT. Each of the G1498 dsRNA or ndsRNA (meroduplex), with or without the 5-methyluridine substitution, was used to transfect HeLa S3 cells having an influenza target sequence associated with a luciferase gene. Also, the G1498 antisense strand alone or the antisense strand annealed to the 11 nucleotide sense strand portion alone or the 10 nucleotide sense strand portion alone were examined for activity.

### Transfection and Dual Luciferase Assay

[0206] The reporter plasmid psiCHECK™-2 (Promega, Madison, Wis.), which constitutively expresses both firefly luc2 (Photinus pyralis) and Renilla (Renilla reniformis, also known as sea pansy) luciferases, was used to clone in a portion of the influenza NP gene downstream of the Renilla translational stop codon that results in a Renilla-influenza NP fusion mRNA. The firefly luciferase in the psiCHECK™-2 vector is used to normalize Renilla luciferase expression and serves as a control for transfection efficiency.

[0207] Multi-well plates were seeded with HeLa S3 cells/well in 100 μl Ham's F12 medium and 10% fetal bovine serum, and incubated overnight at 37° C./5% CO₂. The HeLa S3 cells were transfected with the psiCHECK™-influenza plasmid (75 ng) and G1498 dsRNA or ndsRNA (final concentration of 10 nM or 100 nM) formulated in Lipofectamine 2000 and OPTIMEM reduced serum medium. The transfection mixture was incubated with the HeLa S3 cells with gentle shaking at 37° C. for about 18 to 20 hours.

[0208] After transfecting, firefly luciferase reporter activity was measured first by adding Dual-Glo™ Luciferase Reagent (Promega, Madison, Wis.) for 10 minutes with shaking, and then quantitating the luminescent signal using a VICTOR³™ 1420 Multilabel Counter (PerkinElmer, Waltham, Mass.). After measuring the firefly luminescence, Stop & Glo® Reagent (Promega, Madison, Wis.) was added for 10 minutes with shaking to simultaneously quench the firefly reaction and initiate the Renilla luciferase reaction, and then the Renilla luciferase luminescent signal was quantitated VICTOR³™ 1420 Multilabel Counter (PerkinElmer, Waltham, Mass.).

### Results

[0209] Knockdown activity in transfected and untransfected cells was normalized to a Qneg control dsRNA and presented as a normalized value of the Qneg control (i.e., Qneg represented 100% or “normal” gene expression levels). Thus, a smaller value indicates a greater knockdown effect. The G1498 dsRNA-wt and dsRNA-rT showed similar good knockdown at a 100 nM concentration (FIG. 3). Surprisingly, the G1498 ndsRNA-rT, whether phosphorylated or not, showed good knockdown although somewhat lower than the G1498 dsRNA-wt (FIG. 3). Similar results were obtained with dsRNA or ndsRNA at 10 nM (data not shown). None of the G1498 dsRNA or ndsRNA solutions showed any detectable toxicity in HeLa S3 cells at either 10 nM or 100 nM. Even the presence of only half a nicked sense strand (an 11 nucleotide or 10 nucleotide strand alone) with a G1498 antisense strand showed some detectable activity. These results show that a nicked-type meroduplex dsRNA molecule is unexpectedly capable of promoting gene silencing.

### Example 4

### Knockdown Activity of Nicked mdRNA

[0210] In this example, the activity of a dicer substrate LacZ dsRNA of Example 1 having a sense strand with a nick at various positions was examined. In addition, a dideoxy nucleotide (i.e., ddG) was incorporated at the 5′-end of the 3′-most strand of a sense sequence having a nick or a single nucleotide gap to determine whether the in vivo ligation of the nicked sense strand is “rescuing” activity. The ddG is not a substrate for ligation. Also examined was the influenza dicer substrate dsRNA of Example 7 having a sense strand with a nick at one of positions 8 to 14. The “p” designation indicates that the 5′-end of the 3′-most strand of the nicked sense influenza sequence was phosphorylated. The “L” designation indicates that the G at position 2 of the 5′-most strand of the nicked sense influenza sequence was substituted for a locked nucleic acid G. The Qneg is a negative control dsRNA.

[0211] The dual fluorescence assay of Example 3 was used to measure knockdown activity with 5 nM of the LacZ sequences and 0.5 nM of the influenza sequences. The lacZ dicer substrate (25/27, LacZ-DS) and lacZ RISC activator (21/21, LacZ) are equally active, and the LacZ-DS can be nicked in any position between 8 and 14 without affecting activity (FIG. 3). In addition, the inclusion of a ddG on the 5′-end of the 3′-most LacZ sense sequence having a nick (LacZ:DSNkd13-3′dd) or a one nucleotide gap (LacZ:DSNkd13D1-3′dd) was essentially as active as the unsubstituted sequence (FIG. 4). The influenza dicer substrate (G1498DS) nicked at any one of positions 8 to 14 was also highly active (FIG. 5). Phosphorylation of the 5′-end of the 3′-most strand of the nicked sense influenza sequence had essentially no effect on activity, but addition of a locked nucleic acid appears to improve activity.

### Example 5

### Mean Inhibitory Concentration of mdRNA

[0212] In this example, a dose response assay was performed to measure the mean inhibitory concentration (IC₅₀) of the influenza dicer substrate dsRNA of Example 8 having a sense strand with a nick at position 12, 13, or 14, including or not a locked nucleic acid. The dual luciferase assay of Example 2 was used. The influenza dicer substrate dsRNA (G1498DS) was tested at 0.0004 nM, 0.002 nM, 0.005 nM, 0.019 nM, 0.067 nM, 0.233 nM, 0.816 nM, 2.8 nM, and 10 nM, while the mdRNA with a nick at position 13 (G1498DS:Nkd13) was tested at 0.001 nM, 0.048 nM, 0.167 nM, 1 nM, 2 nM, 7 nM, and 25 nM (see FIG. 6). Also tested were RISC activator molecules (21/21) with or without a nick at various positions (including G1498DS:Nkd11, G1498DS:Nkd12, and G1498DS:Nkd14), each of the nicked versions with a locked nucleic acid as described above (data not shown). The Qneg is a negative control dsRNA.

[0213] The IC₅₀ of the RISC activator G1498 was calculated to be about 22 pM, while the dicer substrate G1498DS IC₅₀ was calculated to be about 6 μM. The IC₅₀ of RISC and Dicer mdRNAs range from about 200 μM to about 15 nM. The inclusion of a single locked nucleic acid reduced the IC₅₀ of Dicer mdRNAs by up 4 fold (data not shown). These results show that a meroduplex dsRNA having a nick or gap in any position is capable of inducing gene silencing.

### Example 6

### Knockdown Activity of Gapped mdRNA

[0214] The activity of an influenza dicer substrate dsRNA having a sense strand with a gap of differing sizes and positions was examined. The influenza dicer substrate dsRNA of Example 8 was generated with a sense strand having a gap of 0 to 6 nucleotides at position 8, a gap of 4 nucleotides at position 9, a gap of 3 nucleotides at position 10, a gap of 2 nucleotides at position 11, and a gap of 1 nucleotide at position 12 (see Table 2). The Qneg is a negative control dsRNA. Each of the mdRNAs was tested at a concentration of 5 nM (data not shown) and 10 nM. The mdRNAs have the following antisense strand 5′-CAUUGUCUCCGAAGAAAUAAGAUCCUU (SEQ ID NO:11), and nicked or gapped sense strands as shown in Table 2.

TABLE 2

| | | | | | |
|---|---|---|---|---|---|
| | 5′ Sense* | 3′ Sense | Gap | Gap | % |
| mdRNA | (SEQ ID NO.) | (SEQ ID NO.) | Pos | Size | KD^{{4} |

| | | | | | |
|---|---|---|---|---|---|
| G1498:DSNkd8 | GGAUCUUA (12) | UUUCUUCGGAGACAAdTdG (13) | 8 | 0 | 67.8 |
| G1498:DSNkd8D1 | GGAUCUUA (12) | UUCUUCGGAGACAAdTdG (14) | 8 | 1 | 60.9 |
| G1498:DSNkd8D2 | GGAUCUUA (12) | UCUUCGGAGACAAdTdG (15) | 8 | 2 | 48.2 |
| G1498:DSNkd8D3 | GGAUCUUA (12) | CUUCGGAGACAAdTdG (16) | 8 | 3 | 44.1 |
| G1498:DSNkd8D4 | GGAUCUUA (12) | UUCGGAGACAAdTdG (17) | 8 | 4 | 30.8 |
| G1498:DSNkd8D5 | GGAUCUUA (12) | UCGGAGACAAdTdG (18) | 8 | 5 | 10.8 |
| G1498:DSNkd8D6 | GGAUCUUA (12) | CGGAGACAAdTdG (19) | 8 | 6 | 17.9 |
| G1498:DSNkd9D4 | GGAUCUUAU (20) | UCGGAGACAAdTdG (18) | 9 | 4 | 38.9 |
| G1498:DSNkd10D3 | GGAUCUUAUU (21) | UCGGAGACAAdTdG (18) | 10 | 3 | 38.4 |
| G1498:DSNkd11D2 | GGAUCUUAUUU (22) | UCGGAGACAAdTdG (18) | 11 | 2 | 46.2 |
| G1498:DSNkd12D1 | GGAUCUUAUUUC (23) | UCGGAGACAAdTdG (18) | 12 | 1 | 49.6 |
| Plasmid | — | — | — | — | 5.3 |

*G indicates a locked nucleic acid G in the 5′ sense strand.
^{†}% KD means percent knockdown activity.

[0215] The dual fluorescence assay of Example 2 was used to measure knockdown activity. Similar results were obtained at both the 5 nM and 10 nM concentrations. These data show that an mdRNA having a gap of up to 6 nucleotides still has activity, although having four or fewer missing nucleotides shows the best activity (see, also, FIG. 7). Thus, mdRNA having various sizes gaps that are in various different positions have knockdown activity.

[0216] To examine the general applicability of a sequence having a sense strand with a gap of differing sizes and positions, a different dsRNA sequence was tested. The lacZ RISC dsRNA of Example 1 was generated with a sense strand having a gap of 0 to 6 nucleotides at position 8, a gap of 5 nucleotides at position 9, a gap of 4 nucleotides at position 10, a gap of 3 nucleotides at position 11, a gap of 2 nucleotides at position 12, a gap of 1 nucleotide at position 12, and a nick (gap of 0) at position 14 (see Table 3). The Qneg is a negative control dsRNA. Each of the mdRNAs was tested at a concentration of 5 nM (data not shown) and 25 nM. The lacZ mdRNAs have the following antisense strand 5′-AAAUCGCUGAUUUGUGUAGdTdTUAAA (SEQ ID NO:2) and nicked or gapped sense strands as shown in Table 3.

TABLE 3

| | | | | |
|---|---|---|---|---|
| | 5′ Sense* | 3′ Sense | Gap | Gap |
| mdRNA | (SEQ ID NO.) | (SEQ ID NO.) | Pos | Size |

| | | | | |
|---|---|---|---|---|
| LacZ:Nkd8 | CUACACAA (24) | AUCAGCGAUUUdTdT (25) | 8 | 0 |
| LacZ:Nkd8D1 | CUACACAA (24) | UCAGCGAUUUdTdT (26) | 8 | 1 |
| LacZ:Nkd8D2 | CUACACAA (24) | CAGCGAUUUdTdT (27) | 8 | 2 |
| LacZ:Nkd8D3 | CUACACAA (24) | AGCGAUUUdTdT (28) | 8 | 3 |
| LacZ:Nkd8D4 | CUACACAA (24) | GCGAUUUdTdT (29) | 8 | 4 |
| LacZ:Nkd8D5 | CUACACAA (24) | CGAUUUdTdT (30) | 8 | 5 |
| LacZ:Nkd8D6 | CUACACAA (24) | GAUUUdTdT (31) | 8 | 6 |
| LacZ:Nkd9D5 | CUACACAAA (32) | GAUUUdTdT (31) | 9 | 5 |
| LacZ:Nkd10D4 | CUACACAAAU (33) | GAUUUdTdT (31) | 10 | 4 |
| LacZ:Nkd11D3 | CUACACAAAUC (34) | GAUUUdTdT (31) | 11 | 3 |
| LacZ:Nkd12D2 | CUACACAAAUCA (35) | GAUUUdTdT (31) | 12 | 2 |
| LacZ:Nkd13D1 | CUACACAAAUCAG (36) | GAUUUdTdT (31) | 13 | 1 |
| LacZ:Nkd14 | CUACACAAAUCAGC (37) | GAUUUdTdT (31) | 14 | 0 |

Aindicates a locked nucleic acid A in each sense strand.

[0217] The dual fluorescence assay of Example 3 was used to measure knockdown activity. FIG. 8 shows that an mdRNA having a gap of up to 6 nucleotides has substantial activity and the position of the gap may affect the potency of knockdown. Thus, mdRNA having various sizes gaps that are in various different positions and in different mdRNA sequences have knockdown activity.

### Example 7

### Knockdown Activity of Substituted mdRNA

[0218] The activity of an influenza dsRNA RISC sequences having a nicked sense strand and the sense strands having locked nucleic acid substitutions were examined. The influenza RISC sequence G1498 of Example 3 was generated with a sense strand having a nick at positions 8 to 14 counting from the 5′-end. Each sense strand was substituted with one or two locked nucleic acids as shown in Table 4. The Qneg and Plasmid are negative controls. Each of the mdRNAs was tested at a concentration of 5 nM. The antisense strand used was 5′-CUCCGAAGAAAUAAGAUCCdTdT (SEQ ID NO:8).

TABLE 4

| | | | | |
|---|---|---|---|---|
| | 5′ Sense* | 3′ Sense | Nick | % |
| mdRNA | (SEQ ID NO.) | (SEQ ID NO.) | Pos | KD |

| | | | | |
|---|---|---|---|---|
| G1498-wt | GGAUCUUAUUUCUUCGGAGdTdT (7) | — | — | 85.8 |
| G1498-L | GGAUCUUAUUUCUUCGGAGdTdT (61) | — | — | 86.8 |
| G1498:Nkd8-1 | GGAUCUUA (12) | UUUCUUCGGAGdTdT (47) | 8 | 36.0 |
| G1498:Nkd8-2 | GGAUCUUA (40) | UUUCUUCGGAGdTdT (54) | 8 | 66.2 |
| G1498:Nkd9-1 | GGAUCUUAU (20) | UUCUUCGGAGdTdT (48) | 9 | 60.9 |
| G1498:Nkd9-2 | GGAUCUUAU (41) | UUCUUCGGAGdTdT (55) | 9 | 64.4 |
| G1498:Nkd10-1 | GGAUCUUAUU (21) | UCUUCGGAGdTdT (49) | 10 | 58.2 |
| G1498:Nkd10-2 | GGAUCUUAUU (42) | UCUUCGGAGdTdT (56) | 10 | 68.5 |
| G1498:Nkd11-1 | GGAUCUUAUUU (22) | CUUCGGAGdTdT (50) | 11 | 75.9 |
| G1498:Nkd11-2 | GGAUCUUAUUU (43) | CUUCGGAGdTdT (57) | 11 | 67.1 |
| G1498:Nkd12-1 | GGAUCUUAUUUC (23) | UUCGGAGdTdT (51) | 12 | 59.9 |
| G1498:Nkd12-2 | GGAUCUUAUUUC (44) | UUCGGAGdTdT (58) | 12 | 72.8 |
| G1498:Nkd13-1 | GGAUCUUAUUUCU (38) | UCGGAGdTdT (52) | 13 | 37.1 |
| G1498:Nkd13-2 | GGAUCUUAUUUCU (45) | UCGGAGdTdT (59) | 13 | 74.3 |
| G1498:Nkd14-1 | GGAUCUUAUUUCUU (39) | CGGAGdTdT (53) | 14 | 29.0 |
| G1498:Nkd14-2 | GGAUCUUAUUUCUU (46) | CGGAGdTdT (60) | 14 | 60.2 |
| Qneg | — | — | — | 0 |
| Plasmid | — | — | — | 3.6 |

*Nucleotides that are bold and underlined are locked nucleic acids.

[0219] The dual fluorescence assay of Example 3 was used to measure knockdown activity. These data show that increasing the number of locked nucleic acid substitutions tends to increase activity of an mdRNA having a nick at any of a number of positions. The single locked nucleic acid per sense strand appears to be most active when the nick is at position 11 (see FIG. 9). But, multiple locked nucleic acids on each sense strand make mdRNA having a nick at any position as active as the most optimal nick position with a single substitution (i.e., position 11) (FIG. 9). Thus, mdRNA having duplex stabilizing modifications make mdRNA essentially equally active regardless of the nick position.

[0220] Similar results were observed when locked nucleic acid substitutions were made in the LacZ dicer substrate mdRNA of Example 2 (SEQ ID NOS:3 and 4). The lacZ dicer was nicked at positions 8 to 14, and a duplicate set of nicked LacZ dicer molecules were made with the exception that the A at position 3 (from the 5′-end) of the 5′ sense strand was substituted for a locked nucleic acid A (LNA-A). As is evident from FIG. 10, most of the nicked lacZ dicer molecules containing LNA-A were as potent in knockdown activity as the unsubstituted lacZ dicer.

### Example 7

### mdRNA Knockdown of Influenza Virus Titer

[0221] The activity of a dicer substrate nicked dsRNA in reducing influenza virus titer as compared to a wild-type dsRNA (i.e., not having a nick) was examined. The influenza dicer substrate sequence (25/27) is as follows:

| | |
|---|---|
| Sense | |
| 5′-GGAUCUUAUUUCUUCGGAGACAAdTdG | (SEQ ID NO:62) |
| Antisense | |
| 5′-CAUUGUCUCCGAAGAAAUAAGAUCCUU | (SEQ ID NO:11) |

The mdRNA sequences have a nicked sense strand after position 12, 13, and 14, respectively, as counted from the 5′-end, and the G at position 2 is substituted with locked nucleic acid G.

[0222] For the viral infectivity assay, Vero cells were seeded at 6.5×10⁴ cells/well the day before transfection in 500 μl 10% FBS/DMEM media per well. Samples of 100, 10, 1, 0.1, and 0.01 nM stock of each dsRNA were complexed with 1.0 μl (1 mg/ml stock) of Lipofectamine™ 2000 (Invitrogen, Carlsbad, Calif.) and incubated for 20 minutes at room temperature in 150 μl OPTIMEM (total volume) (Gibco, Carlsbad, Calif.). Vero cells were washed with OPTIMEM, and 150 μl of the transfection complex in OPTIMEM was then added to each well containing 150 μl of OPTIMEM media. Triplicate wells were tested for each condition. An additional control well with no transfection condition was prepared. Three hours post transfection, the media was removed. Each well was washed once with 200 μl PBS containing 0.3% BSA and 10 mM HEPES/PS. Cells in each well were infected with WSN strain of influenza virus at an MOI 0.01 in 200 μl of infection media containing 0.3% BSA/10 mM HEPES/PS and 4 μg/ml trypsin. The plate was incubated for 1 hour at 37° C. Unadsorbed virus was washed off with the 200 μl of infection media and discarded, then 400 μl DMEM containing 0.3% BSA/10 mM HEPES/PS and 4 μg/ml trypsin was added to each well. The plate was incubated at 37° C., 5% CO₂ for 48 hours, then 50 μl supernatant from each well was tested in duplicate by TCID₅₀ assays (50% Tissue-Culture Infective Dose, WHO protocol) in MDCK cells and titers were estimated using the Spearman and Karber formula. The results show that these mdRNAs show about a 50% to 60% viral titer knockdown, even at a concentration as low as 10 pM (FIG. 11).

[0223] An in vivo influenza mouse model was also used to examine the activity of a dicer substrate nicked dsRNA in reducing influenza virus titer as compared to a wild-type dsRNA (i.e., not having a nick). Female BALB/c mice (age 8-10 weeks with 5-10 mice per group) were dosed intranasally with 120 nmol/kg/day dsRNA (formulated in C12-norArg(NH₃+Cl⁻)—C12/DSPE-PEG2000/DSPC/cholesterol at a ratio of 30:1:20:49) for three consecutive days before intranasal challenge with influenza strain PR8 (20 PFU/mouse). Two days after infection, whole lungs are harvested from each mouse and placed in a solution of PBS/0.3% BSA with antibiotics, homogenize, and measure the viral titer (TCID₅₀). Doses were well tolerated by the mice, indicated by less than 2% body weight reduction in any of the dose groups. The mdRNAs tested exhibit similar, if not slightly greater, virus reduction in vivo as compared to unmodified and unnicked G1498 dicer substrate (see FIG. 12). Hence, mdRNA are active in vivo.

### Example 8

### Effect of mdRNA on Cytokine Induction

[0224] The effect of the mdRNA structure on cytokine induction in vivo was examined. Female BALB/c mice (age 7-9 weeks) were dosed intranasally with about 50 μM dsRNA (formulated in C12-norArg(NH₃+Cl—)—C12/DSPE-PEG2000/DSPC/cholesterol at a ratio of 30:1:20:49) or with 605 nmol/kg/day naked dsRNA for three consecutive days. About four hours after the final dose is administered, the mice were sacrificed to collect bronchoalveolar fluid (BALF), and collected blood is processed to serum for evaluation of the cytokine response. Bronchial lavage was performed with 0.5 mL ice-cold 0.3% BSA in saline two times for a total of 1 mL. BALF was spun and supernatants collected and frozen until cytokine analysis. Blood was collected from the vena cava immediately following euthanasia, placed into serum separator tubes, and allowed to clot at room temperature for at least 20 minutes. The samples were processed to serum, aliquoted into Millipore ULTRAFREE 0.22 μm filter tubes, spun at 12,000 rpm, frozen on dry ice, and then stored at −70° C. until analysis. Cytokine analysis of BALF and plasma were performed using the Procarta mouse 10-Plex Cytokine Assay Kit (Panomics, Fremont, Calif.) on a Bio-Plex array reader. Toxicity parameters were also measured, including body weights, prior to the first dose on day 0 and again on day 3 (just prior to euthanasia). Spleens were harvested and weighed (normalized to final body weight). The results are provided in Table 5.

TABLE 5
In vivo Cytokine Induction by Naked mdRNA

| | | | G1498:Nkd | | G1498:DSNkd | G1498:DSNkd | G1498:DSNkd |
|---|---|---|---|---|---|---|---|
| Cytokine | | G1498 | 11-1 | G1498:DS | 12-1 | 13-1 | 14-1 |
| IL-6 | Conc | 90.68 | 10.07 | 77.35 | 17.17 | 18.21 | 38.59 |
| | (pg/mL) | | | | | | |
| | Fold decrease | — | 9 | — | 5 | 4 | 2 |
| IL-12 | Conc | 661.48 | 20.32 | 1403.61 | 25.07 | 37.70 | 57.02 |
| (p40) | (pg/mL) | | | | | | |
| | Fold decrease | — | 33 | — | 56 | 37 | 25 |
| TNFα | Conc | 264.49 | 25.59 | 112.95 | 20.52 | 29.00 | 64.93 |
| | (pg/mL) | | | | | | |
| | Fold decrease | — | 10 | — | 6 | 4 | 2 |

[0225] The mdRNA (RISC or dicer sized) induced cytokines to lesser extent than the intact (i.e., not nicked) parent molecules. The decrease in cytokine induction was greatest when looking at IL-12(p40), the cytokine with consistently the highest levels of induction of the 10 cytokine multiplex assay. For the mdRNA, the decrease in IL-12 (p40) ranges from 25- to 56-fold, while the reduction in either IL-6 or TNFα induction was more modest (the decrease in these two cytokines ranges from 2- to 10-fold). Thus, the mdRNA structure appears to provide an advantage in vivo in that cytokine induction is minimized compared to unmodified dsRNA.

[0226] Similar results were obtained with the formulated mdRNA, although the reduction in induction was not as prominent. In addition, the presence or absence of a locked nucleic acid has no effect on cytokine induction. These results are shown in Table 6.

TABLE 6
In vivo Cytokine Induction by Formulated mdRNA

| | | | G1498:Nkd | G1498:Nkd | G1498:DSNkd | G1498:DSNkd |
|---|---|---|---|---|---|---|
| Cytokine | | G1498:DS | 12-1 | 13-1 | 14-1 | 13 |
| IL-6 | Conc (pg/mL) | 29.04 | 52.95 | 10.28 | 7.79 | 44.29 |
| | Fold decrease | — | −1.8 | 3 | 4 | −1.5 |
| IL-12 (p40) | Conc (pg/mL) | 298.93 | 604.24 | 136.45 | 126.71 | 551.49 |
| | Fold decrease | — | 0 | 2 | 2 | 1 |
| TNFα | Conc (pg/mL) | 13.49 | 21.35 | 3.15 | 3.15 | 18.69 |
| | Fold decrease | — | −1.6 | 4 | 4 | 1.4 |

[0227] The teachings of all of references cited herein including patents, patent applications, journal articles, webpages, tables, and priority documents are incorporated herein in their entirety by reference. Although the foregoing disclosure has been described in detail by way of example for purposes of clarity of understanding, it will be apparent to the artisan that certain changes and modifications may be practiced within the scope of the appended claims which are presented by way of illustration not limitation. In this context, various publications and other references have been cited within the foregoing disclosure for economy of description. It is noted, however, that the various publications discussed herein are incorporated solely for their disclosure prior to the filing date of the present application, and the inventors reserve the right to antedate such disclosure by virtue of prior invention.

What is claimed is:

1. A meroduplex ribonucleic acid (mdRNA) molecule, comprising a first strand of 15 to 40 nucleotides in length that is complementary to a portion of any one of human v-AKT murine thymoma viral oncogene (AKT) 1 mRNA as set forth in SEQ ID NO:1158, 1159, or 1160, human AKT2 mRNA as set forth in SEQ ID NO:1972, or human AKT3 mRNA as set forth in SEQ ID NO:2483 or 2484, and a second strand and a third strand that are each complementary to non-overlapping regions of the first strand, wherein the second strand and third strand can anneal with the first strand to form at least two double-stranded regions spaced apart by up to 10 nucleotides, and thereby forming a gap between the second and third strands.

2. The mdRNA molecule of claim 1 wherein the first strand is 15 to 25 nucleotides in length or 26 to 40 nucleotides in length.

3. The mdRNA molecule of claim 1 wherein the gap is a nick or the gap comprises at least one unpaired nucleotide in the first strand positioned between the double-stranded regions formed by the second and third strands when annealed to the first strand.

4. The mdRNA molecule of claim 1 wherein at least one uridine of the mdRNA molecule is a 5-methyluridine, 2-thioribothymidine, or 2′-O-methyl-5-methyluridine.

5. The mdRNA molecule of claim 1 wherein the mdRNA molecule comprises at least one locked nucleic acid (LNA) molecule, deoxynucleotide, G-clamp, 2′-sugar modification, modified internucleoside linkage, or any combination thereof.

6. The mdRNA molecule of claim 1 wherein the mdRNA contains at least one 3′-overhang comprising one to four nucleotides that are not part of the gap or wherein the mdRNA has a blunt end at one or both ends of the mdRNA.

7. The mdRNA molecule of claim 1 wherein the third strand comprises a 5′-terminal end comprising a hydroxyl or a phosphate.

8. An mdRNA molecule, comprising a first strand of 15 to 40 nucleotides in length that is complementary to any one of human AKT1 mRNA as set forth in SEQ ID NO:1158, 1159, or 1160, human AKT2 mRNA as set forth in SEQ ID NO:1972, or human AKT3 mRNA as set forth in SEQ ID NO:2483 or 2484, and a second strand and a third strand that are each complementary to non-overlapping regions of the first strand, wherein the second strand and third strand can anneal with the first strand to form at least two double-stranded regions spaced apart by up to 10 nucleotides and thereby forming a gap between the second and third strands, and wherein at least one pyrimidine of the mdRNA comprises a pyrimidine nucleoside according to Formula I or II: [chemical structure]
wherein:
R¹ and R² are each independently a —H, —OH, —OCH₃, —OCH₂OCH₂CH₃, —OCH₂CH₂OCH₃, halogen, substituted or unsubstituted C₁-C₁₀ alkyl, alkoxy, alkoxyalkyl, hydroxyalkyl, carboxyalkyl, alkylsulfonylamino, aminoalkyl, dialkylamino, alkylaminoalkyl, dialkylaminoalkyl, haloalkyl, trifluoromethyl, cycloalkyl, (cycloalkyl)alkyl, substituted or unsubstituted C₂-C₁₀ alkenyl, substituted or unsubstituted —O-allyl, —O—CH₂CH═CH₂, —O—CH═CHCH₃, substituted or unsubstituted C₂-C₁₀ alkynyl, carbamoyl, carbamyl, carboxy, carbonylamino, substituted or unsubstituted aryl, substituted or unsubstituted aralkyl, —NH₂, —NO₂, —C≡N, or heterocyclo group,
R³ and R⁴ are each independently a hydroxyl, a protected hydroxyl, a phosphate, or an internucleoside linking group, and
R⁵ and R⁸ are each independently O or S.

9. The mdRNA molecule of claim 8 wherein the first strand is 15 to 25 nucleotides in length or 26 to 40 nucleotides in length.

10. The mdRNA molecule of claim 8 wherein the gap is a nick or the gap comprises at least one unpaired nucleotide in the first strand positioned between the double-stranded regions formed by the second and third strands when annealed to the first strand.

11. The mdRNA molecule of claim 8 wherein at least one nucleoside is according to Formula I and in which R¹ is methyl and R² is —OH or —O-methyl.

12. The mdRNA molecule of claim 8 wherein at least one R² is selected from the group consisting of 2′-O—(C₁-C₅)alkyl, 2′-O-methyl, 2′-OCH₂OCH₂CH₃, 2′-OCH₂CH₂OCH₃, 2′-O-allyl, and 2′-fluoro.

13. The mdRNA molecule of claim 8 wherein at least one uridine of the mdRNA molecule is a 5-methyluridine, 2-thioribothymidine, or 2′-O-methyl-5-methyluridine.

14. The mdRNA molecule of claim 8 wherein the mdRNA molecule comprises at least one LNA, deoxy nucleotide, G clamp, 2′-sugar modification, modified internucleoside linkage, or any combination thereof.

15. The mdRNA molecule of claim 8, wherein the mdRNA comprises at least one 3′-overhang comprising one to four nucleotides that is not a part of the gap or wherein the mdRNA molecule comprises a blunt end on one or both ends of the mdRNA molecule.

16. An mdRNA molecule, comprising a first strand that is complementary to any one of human AKT1 mRNA as set forth in SEQ ID NO:1158, 1159, or 1160, human AKT2 mRNA as set forth in SEQ ID NO:1972, or human AKT3 mRNA as set forth in SEQ ID NO:2483 or 2484, and a second strand and a third strand that are each complementary to non-overlapping regions of the first strand, wherein the second strand and third strand can anneal with the first strand to form at least two double-stranded regions spaced apart by up to 10 nucleotides and thereby forming a gap between the second and third strands, and wherein the combined double-stranded regions total about 15 base pairs to about 40 base pairs.

17. The mdRNA molecule of claim 16 wherein the first strand is 15 to 25 nucleotides in length or 26 to 40 nucleotides in length.

18. The mdRNA molecule of claim 16 wherein the gap is a nick or the gap comprises at least one unpaired nucleotide in the first strand positioned between the double-stranded regions formed by the second and third strands when annealed to the first strand.

19. The mdRNA molecule of claim 16 wherein at least one uridine of the mdRNA molecule is a 5-methyluridine, 2-thioribothymidine, or 2′-O-methyl-5-methyluridine.

20. The mdRNA molecule of claim 1, wherein the first strand is 19 to 23 nucleotides in length and is complementary to a human AKT1 nucleic acid sequence as set forth in any one of SEQ ID NOS:64, 72, and 1161-1971, or human AKT2 nucleic acid sequence as set forth in any one of SEQ ID NOS:1973-2482, or human AKT3 nucleic acid sequence as set forth in any one of SEQ ID NOS:2485-2861.

21. The mdRNA molecule of claim 1, wherein the first strand is 25 to 29 nucleotides in length and is complementary to a human AKT1 nucleic acid sequence as set forth in any one of SEQ ID NOS:64, 72, and 1161-1971, or human AKT2 nucleic acid sequence as set forth in any one of SEQ ID NOS:1973-2482, or human AKT3 nucleic acid sequence as set forth in any one of SEQ ID NOS:2485-2861.

22. A method for reducing the expression of a human AKT gene, comprising administering an mdRNA molecule according to claim 1 to a cell expressing an AKT gene, wherein the mdRNA molecule reduces expression of the AKT gene in the cell.

23. The method according to claim 22 wherein the cell is human.

The application's sequence listing, which the Patent Office published only in electronic form, follows.

SEQUENCE LISTING (4393 sequences)

SEQ ID NO: 1 - DNA, 21 bp, Artificial Sequence
  Description of Combined DNA/RNA Molecule: Synthetic oligonucleotide
  Description of Artificial Sequence: Synthetic oligonucleotide
cuacacaaaucagcgauuutt

SEQ ID NO: 2 - DNA, 21 bp, Artificial Sequence
  Description of Combined DNA/RNA Molecule: Synthetic oligonucleotide
  Description of Artificial Sequence: Synthetic oligonucleotide
aaaucgcugauuuguguagtt

SEQ ID NO: 3 - DNA, 25 bp, Artificial Sequence
  Description of Combined DNA/RNA Molecule: Synthetic oligonucleotide
  Description of Artificial Sequence: Synthetic oligonucleotide
cuacacaaaucagcgauuuccaugt

SEQ ID NO: 4 - RNA, 27 nt, Artificial Sequence
  Description of Artificial Sequence: Synthetic oligonucleotide
acauggaaaucgcugauuuguguaguc

SEQ ID NO: 5 - RNA, 13 nt, Artificial Sequence
  Description of Artificial Sequence: Synthetic oligonucleotide
cuacacaaaucag

SEQ ID NO: 6 - DNA, 11 bp, Artificial Sequence
  Description of Combined DNA/RNA Molecule: Synthetic oligonucleotide
  Description of Artificial Sequence: Synthetic oligonucleotide
gauuuccaugt

SEQ ID NO: 7 - DNA, 21 bp, Artificial Sequence
  Description of Combined DNA/RNA Molecule: Synthetic oligonucleotide
  Description of Artificial Sequence: Synthetic oligonucleotide
ggaucuuauuucuucggagtt

SEQ ID NO: 8 - DNA, 21 bp, Artificial Sequence
  Description of Combined DNA/RNA Molecule: Synthetic oligonucleotide
  Description of Artificial Sequence: Synthetic oligonucleotide
cuccgaagaaauaagaucctt

SEQ ID NO: 9 - RNA, 11 nt, Artificial Sequence
  Description of Artificial Sequence: Synthetic oligonucleotide
ggaucuuauuu

SEQ ID NO: 10 - DNA, 10 bp, Artificial Sequence
  Description of Combined DNA/RNA Molecule: Synthetic oligonucleotide
  Description of Artificial Sequence: Synthetic oligonucleotide
cuucggagtt

SEQ ID NO: 11 - RNA, 27 nt, Artificial Sequence
  Description of Artificial Sequence: Synthetic oligonucleotide
cauugucuccgaagaaauaagauccuu

SEQ ID NO: 12 - RNA, 8 nt, Artificial Sequence
  Description of Artificial Sequence: Synthetic oligonucleotide
  modified_base (2): LNA-G
ggaucuua

SEQ ID NO: 13 - DNA, 17 bp, Artificial Sequence
  Description of Combined DNA/RNA Molecule: Synthetic oligonucleotide
  Description of Artificial Sequence: Synthetic oligonucleotide
uuucuucggagacaatg

SEQ ID NO: 14 - DNA, 16 bp, Artificial Sequence
  Description of Combined DNA/RNA Molecule: Synthetic oligonucleotide
  Description of Artificial Sequence: Synthetic oligonucleotide
uucuucggagacaatg

SEQ ID NO: 15 - DNA, 15 bp, Artificial Sequence
  Description of Combined DNA/RNA Molecule: Synthetic oligonucleotide
  Description of Artificial Sequence: Synthetic oligonucleotide
ucuucggagacaatg

SEQ ID NO: 16 - DNA, 14 bp, Artificial Sequence
  Description of Combined DNA/RNA Molecule: Synthetic oligonucleotide
  Description of Artificial Sequence: Synthetic oligonucleotide
cuucggagacaatg

SEQ ID NO: 17 - DNA, 13 bp, Artificial Sequence
  Description of Combined DNA/RNA Molecule: Synthetic oligonucleotide
  Description of Artificial Sequence: Synthetic oligonucleotide
uucggagacaatg

SEQ ID NO: 18 - DNA, 12 bp, Artificial Sequence
  Description of Combined DNA/RNA Molecule: Synthetic oligonucleotide
  Description of Artificial Sequence: Synthetic oligonucleotide
ucggagacaatg

SEQ ID NO: 19 - DNA, 11 bp, Artificial Sequence
  Description of Combined DNA/RNA Molecule: Synthetic oligonucleotide
  Description of Artificial Sequence: Synthetic oligonucleotide
cggagacaatg

SEQ ID NO: 20 - RNA, 9 nt, Artificial Sequence
  Description of Artificial Sequence: Synthetic oligonucleotide
  modified_base (2): LNA-G
ggaucuuau

SEQ ID NO: 21 - RNA, 10 nt, Artificial Sequence
  Description of Artificial Sequence: Synthetic oligonucleotide
  modified_base (2): LNA-G
ggaucuuauu

SEQ ID NO: 22 - RNA, 11 nt, Artificial Sequence
  Description of Artificial Sequence: Synthetic oligonucleotide
  modified_base (2): LNA-G
ggaucuuauuu

SEQ ID NO: 23 - RNA, 12 nt, Artificial Sequence
  Description of Artificial Sequence: Synthetic oligonucleotide
  modified_base (2): LNA-G
ggaucuuauuuc

SEQ ID NO: 24 - RNA, 8 nt, Artificial Sequence
  Description of Artificial Sequence: Synthetic oligonucleotide
  modified_base (3): LNA-A
cuacacaa

SEQ ID NO: 25 - DNA, 13 bp, Artificial Sequence
  Description of Artificial Sequence: Synthetic oligonucleotide
  modified_base (8): LNA-A
aucagcgauuutt

SEQ ID NO: 26 - DNA, 12 bp, Artificial Sequence
  Description of Artificial Sequence: Synthetic oligonucleotide
  modified_base (7): LNA-A
ucagcgauuutt

SEQ ID NO: 27 - DNA, 11 bp, Artificial Sequence
  Description of Artificial Sequence: Synthetic oligonucleotide
  modified_base (6): LNA-A
cagcgauuutt

SEQ ID NO: 28 - DNA, 10 bp, Artificial Sequence
  Description of Artificial Sequence: Synthetic oligonucleotide
  modified_base (5): LNA-A
agcgauuutt

SEQ ID NO: 29 - DNA, 9 bp, Artificial Sequence
  Description of Artificial Sequence: Synthetic oligonucleotide
  modified_base (4): LNA-A
gcgauuutt

SEQ ID NO: 30 - DNA, 8 bp, Artificial Sequence
  Description of Artificial Sequence: Synthetic oligonucleotide
  modified_base (3): LNA-A
cgauuutt

SEQ ID NO: 31 - DNA, 7 bp, Artificial Sequence
  Description of Artificial Sequence: Synthetic oligonucleotide
  modified_base (2): LNA-A
gauuutt

SEQ ID NO: 32 - RNA, 9 nt, Artificial Sequence
  Description of Artificial Sequence: Synthetic oligonucleotide
  modified_base (3): LNA-A
cuacacaaa

SEQ ID NO: 33 - RNA, 10 nt, Artificial Sequence
  Description of Artificial Sequence: Synthetic oligonucleotide
  modified_base (3): LNA-A
cuacacaaau

SEQ ID NO: 34 - RNA, 11 nt, Artificial Sequence
  Description of Artificial Sequence: Synthetic oligonucleotide
  modified_base (3): LNA-A
cuacacaaauc

SEQ ID NO: 35 - RNA, 12 nt, Artificial Sequence
  Description of Artificial Sequence: Synthetic oligonucleotide
  modified_base (3): LNA-A
cuacacaaauca

SEQ ID NO: 36 - RNA, 13 nt, Artificial Sequence
  Description of Artificial Sequence: Synthetic oligonucleotide
  modified_base (3): LNA-A
cuacacaaaucag

SEQ ID NO: 37 - RNA, 14 nt, Artificial Sequence
  Description of Artificial Sequence: Synthetic oligonucleotide
  modified_base (3): LNA-A
cuacacaaaucagc

SEQ ID NO: 38 - RNA, 13 nt, Artificial Sequence
  Description of Artificial Sequence: Synthetic oligonucleotide
  modified_base (2): LNA-G
ggaucuuauuucu

SEQ ID NO: 39 - RNA, 14 nt, Artificial Sequence
  Description of Artificial Sequence: Synthetic oligonucleotide
  modified_base (2): LNA-G
ggaucuuauuucuu

SEQ ID NO: 40 - RNA, 8 nt, Artificial Sequence
  Description of Artificial Sequence: Synthetic oligonucleotide
  modified_base (2): LNA-G
  modified_base (8): LNA-A
ggaucuua

SEQ ID NO: 41 - RNA, 9 nt, Artificial Sequence
  Description of Artificial Sequence: Synthetic oligonucleotide
  modified_base (2): LNA-G
  modified_base (9): LNA-U
ggaucuuau

SEQ ID NO: 42 - RNA, 10 nt, Artificial Sequence
  Description of Artificial Sequence: Synthetic oligonucleotide
  modified_base (2): LNA-G
  modified_base (10): LNA-U
ggaucuuauu

SEQ ID NO: 43 - RNA, 11 nt, Artificial Sequence
  Description of Artificial Sequence: Synthetic oligonucleotide
  modified_base (2): LNA-G
  modified_base (11): LNA-U
ggaucuuauuu

SEQ ID NO: 44 - RNA, 12 nt, Artificial Sequence
  Description of Artificial Sequence: Synthetic oligonucleotide
  modified_base (2): LNA-G
  modified_base (12): LNA-C
ggaucuuauuuc

SEQ ID NO: 45 - RNA, 13 nt, Artificial Sequence
  Description of Artificial Sequence: Synthetic oligonucleotide
  modified_base (2): LNA-G
  modified_base (13): LNA-U
ggaucuuauuucu

SEQ ID NO: 46 - RNA, 14 nt, Artificial Sequence
  Description of Artificial Sequence: Synthetic oligonucleotide
  modified_base (2): LNA-G
  modified_base (14): LNA-U
ggaucuuauuucuu

SEQ ID NO: 47 - DNA, 13 bp, Artificial Sequence
  Description of Combined DNA/RNA Molecule: Synthetic oligonucleotide
  Description of Artificial Sequence: Synthetic oligonucleotide
  modified_base (8): LNA-G
uuucuucggagtt

SEQ ID NO: 48 - DNA, 12 bp, Artificial Sequence
  Description of Combined DNA/RNA Molecule: Synthetic oligonucleotide
  Description of Artificial Sequence: Synthetic oligonucleotide
  modified_base (7): LNA-G
uucuucggagtt

SEQ ID NO: 49 - DNA, 11 bp, Artificial Sequence
  Description of Combined DNA/RNA Molecule: Synthetic oligonucleotide
  Description of Artificial Sequence: Synthetic oligonucleotide
  modified_base (6): LNA-G
ucuucggagtt

SEQ ID NO: 50 - DNA, 10 bp, Artificial Sequence
  Description of Combined DNA/RNA Molecule: Synthetic oligonucleotide
  Description of Artificial Sequence: Synthetic oligonucleotide
  modified_base (5): LNA-G
cuucggagtt

SEQ ID NO: 51 - DNA, 9 bp, Artificial Sequence
  Description of Combined DNA/RNA Molecule: Synthetic oligonucleotide
  Description of Artificial Sequence: Synthetic oligonucleotide
  modified_base (4): LNA-G
uucggagtt

SEQ ID NO: 52 - DNA, 8 bp, Artificial Sequence
  Description of Combined DNA/RNA Molecule: Synthetic oligonucleotide
  Description of Artificial Sequence: Synthetic oligonucleotide
  modified_base (3): LNA-G
ucggagtt

SEQ ID NO: 53 - DNA, 7 bp, Artificial Sequence
  Description of Combined DNA/RNA Molecule: Synthetic oligonucleotide
  Description of Artificial Sequence: Synthetic oligonucleotide
  modified_base (2): LNA-G
cggagtt

SEQ ID NO: 54 - DNA, 13 bp, Artificial Sequence
  Description of Combined DNA/RNA Molecule: Synthetic oligonucleotide
  Description of Artificial Sequence: Synthetic oligonucleotide
  modified_base (1): LNA-U
  modified_base (8): LNA-G
uuucuucggagtt

SEQ ID NO: 55 - DNA, 12 bp, Artificial Sequence
  Description of Combined DNA/RNA Molecule: Synthetic oligonucleotide
  Description of Artificial Sequence: Synthetic oligonucleotide
  modified_base (1): LNA-U
  modified_base (7): LNA-G
uucuucggagtt

SEQ ID NO: 56 - DNA, 11 bp, Artificial Sequence
  Description of Combined DNA/RNA Molecule: Synthetic oligonucleotide
  Description of Artificial Sequence: Synthetic oligonucleotide
  modified_base (1): LNA-U
  modified_base (6): LNA-G
ucuucggagtt

SEQ ID NO: 57 - DNA, 10 bp, Artificial Sequence
  Description of Combined DNA/RNA Molecule: Synthetic oligonucleotide
  Description of Artificial Sequence: Synthetic oligonucleotide
  modified_base (1): LNA-C
  modified_base (5): LNA-G
cuucggagtt

SEQ ID NO: 58 - DNA, 9 bp, Artificial Sequence
  Description of Combined DNA/RNA Molecule: Synthetic oligonucleotide
  Description of Artificial Sequence: Synthetic oligonucleotide
  modified_base (1): LNA-U
  modified_base (4): LNA-G
uucggagtt

SEQ ID NO: 59 - DNA, 8 bp, Artificial Sequence
  Description of Combined DNA/RNA Molecule: Synthetic oligonucleotide
  Description of Artificial Sequence: Synthetic oligonucleotide
  modified_base (1): LNA-U
  modified_base (3): LNA-G
ucggagtt

SEQ ID NO: 60 - DNA, 7 bp, Artificial Sequence
  Description of Combined DNA/RNA Molecule: Synthetic oligonucleotide
  Description of Artificial Sequence: Synthetic oligonucleotide
  modified_base (1): LNA-C
  modified_base (2): LNA-G
cggagtt

SEQ ID NO: 61 - DNA, 21 bp, Artificial Sequence
  Description of Combined DNA/RNA Molecule: Synthetic oligonucleotide
  Description of Artificial Sequence: Synthetic oligonucleotide
  modified_base (2): LNA-G
  modified_base (16): LNA-G
ggaucuuauuucuucggagtt

SEQ ID NO: 62 - DNA, 25 bp, Artificial Sequence
  Description of Combined DNA/RNA Molecule: Synthetic oligonucleotide
  Description of Artificial Sequence: Synthetic oligonucleotide
ggaucuuauuucuucggagacaatg

SEQ ID NO: 63 - RNA, 25 nt, Artificial Sequence
  Description of Artificial Sequence: Synthetic oligonucleotide
uuaagcagaguucaaaagcccuuca

SEQ ID NO: 64 - RNA, 25 nt, Artificial Sequence
  Description of Artificial Sequence: Synthetic oligonucleotide
uaagcagaguucaaaagcccuucag

SEQ ID NO: 65 - RNA, 25 nt, Artificial Sequence
  Description of Artificial Sequence: Synthetic oligonucleotide
agcagaguucaaaagcccuucagcg

SEQ ID NO: 66 - RNA, 25 nt, Artificial Sequence
  Description of Artificial Sequence: Synthetic oligonucleotide
cucagggucugagugaagccgcucg

SEQ ID NO: 67 - RNA, 25 nt, Artificial Sequence
  Description of Artificial Sequence: Synthetic oligonucleotide
caagcaacuacaucacgccagucaa

SEQ ID NO: 68 - RNA, 25 nt, Artificial Sequence
  Description of Artificial Sequence: Synthetic oligonucleotide
aucaauggcagcuucuuggugcgug

SEQ ID NO: 69 - RNA, 25 nt, Artificial Sequence
  Description of Artificial Sequence: Synthetic oligonucleotide
uuccagcccacauuggauucaucag

SEQ ID NO: 70 - RNA, 25 nt, Artificial Sequence
  Description of Artificial Sequence: Synthetic oligonucleotide
cagcugagaauguggaauaccuaag

SEQ ID NO: 71 - RNA, 25 nt, Artificial Sequence
  Description of Artificial Sequence: Synthetic oligonucleotide
aacguaucuccuaauuugaggcuca

SEQ ID NO: 72 - RNA, 25 nt, Artificial Sequence
  Description of Artificial Sequence: Synthetic oligonucleotide
ccuaaaauaauuucucuacaauugg

SEQ ID NO: 73 - RNA, 25 nt, Artificial Sequence
  Description of Artificial Sequence: Synthetic oligonucleotide
uggaagauucagcuaguuaggagcc

SEQ ID NO: 74 - RNA, 25 nt, Artificial Sequence
  Description of Artificial Sequence: Synthetic oligonucleotide
uuaaacucuccuagucaauauccac

SEQ ID NO: 75 - RNA, 25 nt, Artificial Sequence
  Description of Artificial Sequence: Synthetic oligonucleotide
cagccuacaguuauguucagucaca

SEQ ID NO: 76 - RNA, 25 nt, Artificial Sequence
  Description of Artificial Sequence: Synthetic oligonucleotide
guuauguucagucacacacacauac

SEQ ID NO: 77 - RNA, 25 nt, Artificial Sequence
  Description of Artificial Sequence: Synthetic oligonucleotide
cacauacaaaauguuccuuuugcuu

SEQ ID NO: 78 - RNA, 25 nt, Artificial Sequence
  Description of Artificial Sequence: Synthetic oligonucleotide
uccuuuugcuuuuaaaguaauuuuu

SEQ ID NO: 79 - RNA, 25 nt, Artificial Sequence
  Description of Artificial Sequence: Synthetic oligonucleotide
ugaccugugaagcaacagucaaugg

SEQ ID NO: 80 - RNA, 25 nt, Artificial Sequence
  Description of Artificial Sequence: Synthetic oligonucleotide
cuaucucacacaucgacaaaccaau

SEQ ID NO: 81 - RNA, 25 nt, Artificial Sequence
  Description of Artificial Sequence: Synthetic oligonucleotide
uguccucaauuguacugcuaccacu

SEQ ID NO: 82 - RNA, 25 nt, Artificial Sequence
  Description of Artificial Sequence: Synthetic oligonucleotide
aaaccguagcuggcaagcggucuua

SEQ ID NO: 83 - RNA, 25 nt, Artificial Sequence
  Description of Artificial Sequence: Synthetic oligonucleotide
uagcuggcaagcggucuuaccggcu

SEQ ID NO: 84 - RNA, 25 nt, Artificial Sequence
  Description of Artificial Sequence: Synthetic oligonucleotide
uuguaugguuaaaagauggguuacc

SEQ ID NO: 85 - RNA, 25 nt, Artificial Sequence
  Description of Artificial Sequence: Synthetic oligonucleotide
ugguuaaaagauggguuaccugcga

SEQ ID NO: 86 - RNA, 25 nt, Artificial Sequence
  Description of Artificial Sequence: Synthetic oligonucleotide
cagggaauuauacaaucuugcugag

SEQ ID NO: 87 - RNA, 25 nt, Artificial Sequence
  Description of Artificial Sequence: Synthetic oligonucleotide
acaaucuugcugagcauaaaacagu

SEQ ID NO: 88 - RNA, 25 nt, Artificial Sequence
  Description of Artificial Sequence: Synthetic oligonucleotide
ccaauaaugaagaguccuuuauccu

SEQ ID NO: 89 - RNA, 25 nt, Artificial Sequence
  Description of Artificial Sequence: Synthetic oligonucleotide
acuuuggauguuccaacgcaaguug

SEQ ID NO: 90 - RNA, 25 nt, Artificial Sequence
  Description of Artificial Sequence: Synthetic oligonucleotide
aaugcuuccacuaaacugaaaccau

SEQ ID NO: 91 - RNA, 25 nt, Artificial Sequence
  Description of Artificial Sequence: Synthetic oligonucleotide
gagaaaguuugacuuuguuaaauau

SEQ ID NO: 92 - RNA, 25 nt, Artificial Sequence
  Description of Artificial Sequence: Synthetic oligonucleotide
aaagaacuacuguauauuaaaaguu

SEQ ID NO: 93 - RNA, 25 nt, Artificial Sequence
  Description of Artificial Sequence: Synthetic oligonucleotide
uuagaaauacggguuuugacuuaac

SEQ ID NO: 94 - RNA, 25 nt, Artificial Sequence
  Description of Artificial Sequence: Synthetic oligonucleotide
aacauggguacagcaaacucagcac

SEQ ID NO: 95 - RNA, 25 nt, Artificial Sequence
  Description of Artificial Sequence: Synthetic oligonucleotide
aaagacacagaagaugcugaccuca

SEQ ID NO: 96 - RNA, 25 nt, Artificial Sequence
  Description of Artificial Sequence: Synthetic oligonucleotide
uaguagggagguuuauucagaucgc

SEQ ID NO: 97 - RNA, 25 nt, Artificial Sequence
  Description of Artificial Sequence: Synthetic oligonucleotide
gccuucugcagcaggguucugggau

SEQ ID NO: 98 - RNA, 25 nt, Artificial Sequence
  Description of Artificial Sequence: Synthetic oligonucleotide
ggucugguacauauuggaaauuaug

SEQ ID NO: 99 - RNA, 25 nt, Artificial Sequence
  Description of Artificial Sequence: Synthetic oligonucleotide
cuaguccuuccgauggaagcacuag

SEQ ID NO: 100 - RNA, 25 nt, Artificial Sequence
  Description of Artificial Sequence: Synthetic oligonucleotide
ccagugaauauuguuuuuaugugga

SEQ ID NO: 101 - RNA, 25 nt, Artificial Sequence
  Description of Artificial Sequence: Synthetic oligonucleotide
augaauucaaguuggaauugguaga

SEQ ID NO: 102 - RNA, 25 nt, Artificial Sequence
  Description of Artificial Sequence: Synthetic oligonucleotide
caggacacagauuuagacuuggaga

SEQ ID NO: 103 - RNA, 25 nt, Artificial Sequence
  Description of Artificial Sequence: Synthetic oligonucleotide
cucaaagcacaguuacaguauucca

SEQ ID NO: 104 - RNA, 25 nt, Artificial Sequence
  Description of Artificial Sequence: Synthetic oligonucleotide
accacugccaccacugaugaauuaa

SEQ ID NO: 105 - RNA, 25 nt, Artificial Sequence
  Description of Artificial Sequence: Synthetic oligonucleotide
gaaacuacuagugccacaucaucac

SEQ ID NO: 106 - RNA, 25 nt, Artificial Sequence
  Description of Artificial Sequence: Synthetic oligonucleotide
aagucggacagccucaccaaacaga

SEQ ID NO: 107 - RNA, 25 nt, Artificial Sequence
  Description of Artificial Sequence: Synthetic oligonucleotide
gaaagcgaaaaauggaacaugaugg

SEQ ID NO: 108 - RNA, 25 nt, Artificial Sequence
  Description of Artificial Sequence: Synthetic oligonucleotide
cccucugauuuagcauguagacugc

SEQ ID NO: 109 - RNA, 25 nt, Artificial Sequence
  Description of Artificial Sequence: Synthetic oligonucleotide
ugagcuauuuaaggaucuauuuaug

SEQ ID NO: 110 - RNA, 25 nt, Artificial Sequence
  Description of Artificial Sequence: Synthetic oligonucleotide
aaaaggugaaaaagcacuauuauca

SEQ ID NO: 111 - RNA, 25 nt, Artificial Sequence
  Description of Artificial Sequence: Synthetic oligonucleotide
gaaaaagcacuauuaucaguucugc

SEQ ID NO: 112 - RNA, 25 nt, Artificial Sequence
  Description of Artificial Sequence: Synthetic oligonucleotide
ggcugaaaagaaagauuaaaccuac

SEQ ID NO: 113 - RNA, 25 nt, Artificial Sequence
  Description of Artificial Sequence: Synthetic oligonucleotide
uaaacccuuauaauaaaauccuucu

SEQ ID NO: 114 - RNA, 25 nt, Artificial Sequence
  Description of Artificial Sequence: Synthetic oligonucleotide
cauacuauuagccaaugcuguagac

SEQ ID NO: 115 - RNA, 25 nt, Artificial Sequence
  Description of Artificial Sequence: Synthetic oligonucleotide
gacagaagcauuuugauaggaauag

SEQ ID NO: 116 - RNA, 25 nt, Artificial Sequence
  Description of Artificial Sequence: Synthetic oligonucleotide
agagcaaauaagauaauggcccuga

SEQ ID NO: 117 - RNA, 25 nt, Artificial Sequence
  Description of Artificial Sequence: Synthetic oligonucleotide
ccaacauuuuucucuuccucaagca

SEQ ID NO: 118 - RNA, 25 nt, Artificial Sequence
  Description of Artificial Sequence: Synthetic oligonucleotide
uuaaguaugagaaaaguucagccca

SEQ ID NO: 119 - RNA, 25 nt, Artificial Sequence
  Description of Artificial Sequence: Synthetic oligonucleotide
caggaauaaagauggcugcugaacc

SEQ ID NO: 120 - RNA, 25 nt, Artificial Sequence
  Description of Artificial Sequence: Synthetic oligonucleotide
aauuugaaugaccaaguucucuuca

SEQ ID NO: 121 - RNA, 25 nt, Artificial Sequence
  Description of Artificial Sequence: Synthetic oligonucleotide
auguauaaagauagccagccuagag

SEQ ID NO: 122 - RNA, 25 nt, Artificial Sequence
  Description of Artificial Sequence: Synthetic oligonucleotide
ggcuguaacuaucucugugaagugu

SEQ ID NO: 123 - RNA, 25 nt, Artificial Sequence
  Description of Artificial Sequence: Synthetic oligonucleotide
ucugugaagugugagaaaauuucaa

SEQ ID NO: 124 - RNA, 25 nt, Artificial Sequence
  Description of Artificial Sequence: Synthetic oligonucleotide
ccuuuaaggaaaugaauccuccuga

SEQ ID NO: 125 - RNA, 25 nt, Artificial Sequence
  Description of Artificial Sequence: Synthetic oligonucleotide
aaggauacaaaaagugacaucauau

SEQ ID NO: 126 - RNA, 25 nt, Artificial Sequence
  Description of Artificial Sequence: Synthetic oligonucleotide
agaugcaauuugaaucuucaucaua

SEQ ID NO: 127 - RNA, 25 nt, Artificial Sequence
  Description of Artificial Sequence: Synthetic oligonucleotide
guucaaaacgaagacuagcuauuaa

SEQ ID NO: 128 - RNA, 25 nt, Artificial Sequence
  Description of Artificial Sequence: Synthetic oligonucleotide
gugaaaccucaucucuacuaaaaau

SEQ ID NO: 129 - RNA, 25 nt, Artificial Sequence
  Description of Artificial Sequence: Synthetic oligonucleotide
acgaaagagaagcucuaucucgccu

SEQ ID NO: 130 - RNA, 25 nt, Artificial Sequence
  Description of Artificial Sequence: Synthetic oligonucleotide
cuccacaagcgccuucgguccaguu

SEQ ID NO: 131 - RNA, 25 nt, Artificial Sequence
  Description of Artificial Sequence: Synthetic oligonucleotide
gagaagauuccaaagauguagccgc

SEQ ID NO: 132 - RNA, 25 nt, Artificial Sequence
  Description of Artificial Sequence: Synthetic oligonucleotide
aaucuggauucaaugaggagacuug

SEQ ID NO: 133 - RNA, 25 nt, Artificial Sequence
  Description of Artificial Sequence: Synthetic oligonucleotide
agaacagauuugagaguagugagga

SEQ ID NO: 134 - RNA, 25 nt, Artificial Sequence
  Description of Artificial Sequence: Synthetic oligonucleotide
ccagagcugugcagaugaguacaaa

SEQ ID NO: 135 - RNA, 25 nt, Artificial Sequence
  Description of Artificial Sequence: Synthetic oligonucleotide
ccucagauuguuguuguuaaugggc

SEQ ID NO: 136 - RNA, 25 nt, Artificial Sequence
  Description of Artificial Sequence: Synthetic oligonucleotide
cuauuuuaauuauuuuuaauuuauu

SEQ ID NO: 137 - RNA, 25 nt, Artificial Sequence
  Description of Artificial Sequence: Synthetic oligonucleotide
uuuaauuuauuaauauuuaaauaug

SEQ ID NO: 138 - RNA, 25 nt, Artificial Sequence
  Description of Artificial Sequence: Synthetic oligonucleotide
augcaguuugaauauccuuuguuuc

SEQ ID NO: 139 - RNA, 25 nt, Artificial Sequence
  Description of Artificial Sequence: Synthetic oligonucleotide
caugcugcuggcgucuaaguguuug

SEQ ID NO: 140 - RNA, 25 nt, Artificial Sequence
  Description of Artificial Sequence: Synthetic oligonucleotide
agaugugcauuucaccugugacaaa

SEQ ID NO: 141 - RNA, 25 nt, Artificial Sequence
  Description of Artificial Sequence: Synthetic oligonucleotide
ucaaaaccugugccaggcugaauua

SEQ ID NO: 142 - RNA, 25 nt, Artificial Sequence
  Description of Artificial Sequence: Synthetic oligonucleotide
gaauguggguagucauucuuacaau

SEQ ID NO: 143 - RNA, 25 nt, Artificial Sequence
  Description of Artificial Sequence: Synthetic oligonucleotide
auguggguagucauucuuacaauug

SEQ ID NO: 144 - RNA, 25 nt, Artificial Sequence
  Description of Artificial Sequence: Synthetic oligonucleotide
ugaaaaugagcaucagagaguguac

SEQ ID NO: 145 - RNA, 25 nt, Artificial Sequence
  Description of Artificial Sequence: Synthetic oligonucleotide
uugcuuuucauguagaacucagcag

SEQ ID NO: 146 - RNA, 25 nt, Artificial Sequence
  Description of Artificial Sequence: Synthetic oligonucleotide
uguauuucuauauuuauuuucagua

SEQ ID NO: 147 - RNA, 25 nt, Artificial Sequence
  Description of Artificial Sequence: Synthetic oligonucleotide
uuugauuaauguuucuuaaauggaa

SEQ ID NO: 148 - RNA, 25 nt, Artificial Sequence
  Description of Artificial Sequence: Synthetic oligonucleotide
caacguguauagugccuaaaauugu

SEQ ID NO: 149 - RNA, 25 nt, Artificial Sequence
  Description of Artificial Sequence: Synthetic oligonucleotide
cauauccuuggcuacuaacaucugg

SEQ ID NO: 150 - RNA, 25 nt, Artificial Sequence
  Description of Artificial Sequence: Synthetic oligonucleotide
uacuaacaucuggagacugugagcu

SEQ ID NO: 151 - RNA, 25 nt, Artificial Sequence
  Description of Artificial Sequence: Synthetic oligonucleotide
cauaaguugugugcuuuuuauuaau

SEQ ID NO: 152 - RNA, 25 nt, Artificial Sequence
  Description of Artificial Sequence: Synthetic oligonucleotide
gcaucauuuuggcucuucuuacauu

SEQ ID NO: 153 - RNA, 25 nt, Artificial Sequence
  Description of Artificial Sequence: Synthetic oligonucleotide
gcucuucuuacauuuguaaaaaugu

SEQ ID NO: 154 - RNA, 25 nt, Artificial Sequence
  Description of Artificial Sequence: Synthetic oligonucleotide
agauuaggucaucuuaauucauauu

SEQ ID NO: 155 - RNA, 25 nt, Artificial Sequence
  Description of Artificial Sequence: Synthetic oligonucleotide
auggaauugaaagaacuaaucauga

SEQ ID NO: 156 - RNA, 25 nt, Artificial Sequence
  Description of Artificial Sequence: Synthetic oligonucleotide
cacacucauuccuucugcucuuggg

SEQ ID NO: 157 - RNA, 25 nt, Artificial Sequence
  Description of Artificial Sequence: Synthetic oligonucleotide
uguagagguaaccaguagcuuugag

SEQ ID NO: 158 - RNA, 25 nt, Artificial Sequence
  Description of Artificial Sequence: Synthetic oligonucleotide
caaccacaugccacguaauauuuca

SEQ ID NO: 159 - RNA, 25 nt, Artificial Sequence
  Description of Artificial Sequence: Synthetic oligonucleotide
ucggaaacaaguuauucucuucacu

SEQ ID NO: 160 - RNA, 25 nt, Artificial Sequence
  Description of Artificial Sequence: Synthetic oligonucleotide
acucccaauaacuaaugcuaagaaa

SEQ ID NO: 161 - RNA, 25 nt, Artificial Sequence
  Description of Artificial Sequence: Synthetic oligonucleotide
aaugcuaagaaaugcugaaaaucaa

SEQ ID NO: 162 - RNA, 25 nt, Artificial Sequence
  Description of Artificial Sequence: Synthetic oligonucleotide
gucuuucucuaaauaugauuacuuu

SEQ ID NO: 163 - RNA, 25 nt, Artificial Sequence
  Description of Artificial Sequence: Synthetic oligonucleotide
ugaauuucaggcauuuuguucuaca

SEQ ID NO: 164 - RNA, 25 nt, Artificial Sequence
  Description of Artificial Sequence: Synthetic oligonucleotide
cgauucccucucacccgggacucuc

SEQ ID NO: 165 - RNA, 25 nt, Artificial Sequence
  Description of Artificial Sequence: Synthetic oligonucleotide
aggaaagugaaccuuuaaaguaaag

SEQ ID NO: 166 - RNA, 25 nt, Artificial Sequence
  Description of Artificial Sequence: Synthetic oligonucleotide
gaggcugcaugcucuggaagccugg

SEQ ID NO: 167 - RNA, 25 nt, Artificial Sequence
  Description of Artificial Sequence: Synthetic oligonucleotide
ucucugaacagaaaacaaaagagag

SEQ ID NO: 168 - RNA, 25 nt, Artificial Sequence
  Description of Artificial Sequence: Synthetic oligonucleotide
aacuuggcuguaaucaguuaugccg

SEQ ID NO: 169 - RNA, 25 nt, Artificial Sequence
  Description of Artificial Sequence: Synthetic oligonucleotide
agaagccaaaauuaaaagaagucca

SEQ ID NO: 170 - RNA, 25 nt, Artificial Sequence
  Description of Artificial Sequence: Synthetic oligonucleotide
auuaaaagaaguccaggugagguua

SEQ ID NO: 171 - RNA, 25 nt, Artificial Sequence
  Description of Artificial Sequence: Synthetic oligonucleotide
gaauccggauuaucgggaagaggac

SEQ ID NO: 172 - RNA, 25 nt, Artificial Sequence
  Description of Artificial Sequence: Synthetic oligonucleotide
aaugugacaucaaagcaaguauugu

SEQ ID NO: 173 - RNA, 25 nt, Artificial Sequence
  Description of Artificial Sequence: Synthetic oligonucleotide
caucaaagcaaguauuguagcacuc

SEQ ID NO: 174 - RNA, 25 nt, Artificial Sequence
  Description of Artificial Sequence: Synthetic oligonucleotide
agagagagaaaacaaaaccacaaau

SEQ ID NO: 175 - RNA, 25 nt, Artificial Sequence
  Description of Artificial Sequence: Synthetic oligonucleotide
ucgcuguaguauuuaagcccauaca

SEQ ID NO: 176 - RNA, 25 nt, Artificial Sequence
  Description of Artificial Sequence: Synthetic oligonucleotide
cgcuguaguauuuaagcccauacag

SEQ ID NO: 177 - RNA, 25 nt, Artificial Sequence
  Description of Artificial Sequence: Synthetic oligonucleotide
auuuaagcccauacagaaaccuucc

SEQ ID NO: 178 - RNA, 25 nt, Artificial Sequence
  Description of Artificial Sequence: Synthetic oligonucleotide
auuaaaauaaacaugguauaccuac

SEQ ID NO: 179 - RNA, 25 nt, Artificial Sequence
  Description of Artificial Sequence: Synthetic oligonucleotide
cuguucugaucggccaguuuucgga

SEQ ID NO: 180 - RNA, 25 nt, Artificial Sequence
  Description of Artificial Sequence: Synthetic oligonucleotide
aaauaauuugaacuuuggaacaggg

SEQ ID NO: 181 - RNA, 25 nt, Artificial Sequence
  Description of Artificial Sequence: Synthetic oligonucleotide
ugcgaccuuaauuuaacuuuccagu

SEQ ID NO: 182 - RNA, 25 nt, Artificial Sequence
  Description of Artificial Sequence: Synthetic oligonucleotide
cugagaaagcuaaaguuugguuuug

SEQ ID NO: 183 - RNA, 25 nt, Artificial Sequence
  Description of Artificial Sequence: Synthetic oligonucleotide
aguaaagaugcuacuucccacugua

SEQ ID NO: 184 - RNA, 25 nt, Artificial Sequence
  Description of Artificial Sequence: Synthetic oligonucleotide
cugcuuaauugcugauaccauauga

SEQ ID NO: 185 - RNA, 25 nt, Artificial Sequence
  Description of Artificial Sequence: Synthetic oligonucleotide
uaccauaugaaugaaacaugggcug

SEQ ID NO: 186 - RNA, 25 nt, Artificial Sequence
  Description of Artificial Sequence: Synthetic oligonucleotide
aacuuucuuauccaacuuuuucaua

SEQ ID NO: 187 - RNA, 25 nt, Artificial Sequence
  Description of Artificial Sequence: Synthetic oligonucleotide
ccuugcaugacaucaugaggccgga

SEQ ID NO: 188 - RNA, 25 nt, Artificial Sequence
  Description of Artificial Sequence: Synthetic oligonucleotide
ugaauuuguauaugacugcauuugu

SEQ ID NO: 189 - RNA, 25 nt, Artificial Sequence
  Description of Artificial Sequence: Synthetic oligonucleotide
gaauccuaguagaauguuuacuacc

SEQ ID NO: 190 - RNA, 25 nt, Artificial Sequence
  Description of Artificial Sequence: Synthetic oligonucleotide
gaaagggaagaauuuuuugaugaaa

SEQ ID NO: 191 - RNA, 25 nt, Artificial Sequence
  Description of Artificial Sequence: Synthetic oligonucleotide
uaucggcaugccagugugugaauuu

SEQ ID NO: 192 - RNA, 25 nt, Artificial Sequence
  Description of Artificial Sequence: Synthetic oligonucleotide
caccucauaguagagcaauguaugu

SEQ ID NO: 193 - RNA, 25 nt, Artificial Sequence
  Description of Artificial Sequence: Synthetic oligonucleotide
ccagaauugccaaagcacauauaua

SEQ ID NO: 194 - RNA, 25 nt, Artificial Sequence
  Description of Artificial Sequence: Synthetic oligonucleotide
uggugaucuggguaauaguuucucc

SEQ ID NO: 195 - RNA, 25 nt, Artificial Sequence
  Description of Artificial Sequence: Synthetic oligonucleotide
gaucuggguaauaguuucuccaaau

SEQ ID NO: 196 - RNA, 25 nt, Artificial Sequence
  Description of Artificial Sequence: Synthetic oligonucleotide
ggaugugaugaauacuuccuagaaa

SEQ ID NO: 197 - RNA, 25 nt, Artificial Sequence
  Description of Artificial Sequence: Synthetic oligonucleotide
cauuuccacagcuacaccauauaug

SEQ ID NO: 198 - RNA, 25 nt, Artificial Sequence
  Description of Artificial Sequence: Synthetic oligonucleotide
acagcuacaccauauaugaauggag

SEQ ID NO: 199 - RNA, 25 nt, Artificial Sequence
  Description of Artificial Sequence: Synthetic oligonucleotide
ugcaguucuuacacgagaagaagau

SEQ ID NO: 200 - RNA, 25 nt, Artificial Sequence
  Description of Artificial Sequence: Synthetic oligonucleotide
acgagaagaagaucauuuacaggga

SEQ ID NO: 201 - RNA, 25 nt, Artificial Sequence
  Description of Artificial Sequence: Synthetic oligonucleotide
cgagaagaagaucauuuacagggac

SEQ ID NO: 202 - RNA, 25 nt, Artificial Sequence
  Description of Artificial Sequence: Synthetic oligonucleotide
aagaagaucauuuacagggaccuga

SEQ ID NO: 203 - RNA, 25 nt, Artificial Sequence
  Description of Artificial Sequence: Synthetic oligonucleotide
agaggaagagguguuugacugcauc

SEQ ID NO: 204 - RNA, 25 nt, Artificial Sequence
  Description of Artificial Sequence: Synthetic oligonucleotide
gaggaagagguguuugacugcaucg

SEQ ID NO: 205 - RNA, 25 nt, Artificial Sequence
  Description of Artificial Sequence: Synthetic oligonucleotide
cuacuuugagggcgaguucacaggg

SEQ ID NO: 206 - RNA, 25 nt, Artificial Sequence
  Description of Artificial Sequence: Synthetic oligonucleotide
agggcaucuccuggcaccucugucc

SEQ ID NO: 207 - RNA, 25 nt, Artificial Sequence
  Description of Artificial Sequence: Synthetic oligonucleotide
ggagugauaugguuugucuuuuuaa

SEQ ID NO: 208 - RNA, 25 nt, Artificial Sequence
  Description of Artificial Sequence: Synthetic oligonucleotide
gagugauaugguuugucuuuuuaag

SEQ ID NO: 209 - RNA, 25 nt, Artificial Sequence
  Description of Artificial Sequence: Synthetic oligonucleotide
ugcaguaaagauccuaaagguuguc

SEQ ID NO: 210 - RNA, 25 nt, Artificial Sequence
  Description of Artificial Sequence: Synthetic oligonucleotide
aguaaagauccuaaagguugucgac

SEQ ID NO: 211 - RNA, 25 nt, Artificial Sequence
  Description of Artificial Sequence: Synthetic oligonucleotide
ugacaaaggacaaccuggcaauugu

SEQ ID NO: 212 - RNA, 25 nt, Artificial Sequence
  Description of Artificial Sequence: Synthetic oligonucleotide
gcaauugugacccaguggugcgagg

SEQ ID NO: 213 - RNA, 25 nt, Artificial Sequence
  Description of Artificial Sequence: Synthetic oligonucleotide
aacaucauccauagagacaugaaau

SEQ ID NO: 214 - RNA, 25 nt, Artificial Sequence
  Description of Artificial Sequence: Synthetic oligonucleotide
ugaaauccaacaauauauuucucca

SEQ ID NO: 215 - RNA, 25 nt, Artificial Sequence
  Description of Artificial Sequence: Synthetic oligonucleotide
aacaauauauuucuccaugaaggcu

SEQ ID NO: 216 - RNA, 25 nt, Artificial Sequence
  Description of Artificial Sequence: Synthetic oligonucleotide
aacaguaaagucacgcuggaguggu

SEQ ID NO: 217 - RNA, 25 nt, Artificial Sequence
  Description of Artificial Sequence: Synthetic oligonucleotide
ugugaagaaaguaaaggaagagagg

SEQ ID NO: 218 - RNA, 25 nt, Artificial Sequence
  Description of Artificial Sequence: Synthetic oligonucleotide
cuuccgagccauccuugcaucgggc

SEQ ID NO: 219 - RNA, 25 nt, Artificial Sequence
  Description of Artificial Sequence: Synthetic oligonucleotide
aauggagguugaauauccuacugug

SEQ ID NO: 220 - RNA, 25 nt, Artificial Sequence
  Description of Artificial Sequence: Synthetic oligonucleotide
ggagguugaauauccuacuguguaa

SEQ ID NO: 221 - RNA, 25 nt, Artificial Sequence
  Description of Artificial Sequence: Synthetic oligonucleotide
auuuugaguuuucccuuguagugua

SEQ ID NO: 222 - RNA, 25 nt, Artificial Sequence
  Description of Artificial Sequence: Synthetic oligonucleotide
uauccuguuuguucuuuguugauug

SEQ ID NO: 223 - RNA, 25 nt, Artificial Sequence
  Description of Artificial Sequence: Synthetic oligonucleotide
ccuguuuguucuuuguugauugaaa

SEQ ID NO: 224 - RNA, 25 nt, Artificial Sequence
  Description of Artificial Sequence: Synthetic oligonucleotide
cucuacagccuucuuuuucuuccau

SEQ ID NO: 225 - RNA, 25 nt, Artificial Sequence
  Description of Artificial Sequence: Synthetic oligonucleotide
ucuuccauagcuaaucuuccuucua

SEQ ID NO: 226 - RNA, 25 nt, Artificial Sequence
  Description of Artificial Sequence: Synthetic oligonucleotide
auaaucuuccuguugaaugcuucau

SEQ ID NO: 227 - RNA, 25 nt, Artificial Sequence
  Description of Artificial Sequence: Synthetic oligonucleotide
uaaucuuccuguugaaugcuucaug

SEQ ID NO: 228 - RNA, 25 nt, Artificial Sequence
  Description of Artificial Sequence: Synthetic oligonucleotide
cuucaugacuugaauucuacuuuga

SEQ ID NO: 229 - RNA, 25 nt, Artificial Sequence
  Description of Artificial Sequence: Synthetic oligonucleotide
aagagggagagaagcaacuacagac

SEQ ID NO: 230 - RNA, 25 nt, Artificial Sequence
  Description of Artificial Sequence: Synthetic oligonucleotide
cgucuccuaccagaccaaggucaac

SEQ ID NO: 231 - RNA, 25 nt, Artificial Sequence
  Description of Artificial Sequence: Synthetic oligonucleotide
gaucaaucggcccgacuaucucgac

SEQ ID NO: 232 - RNA, 25 nt, Artificial Sequence
  Description of Artificial Sequence: Synthetic oligonucleotide
ggacgaacauccaaccuucccaaac

SEQ ID NO: 233 - RNA, 25 nt, Artificial Sequence
  Description of Artificial Sequence: Synthetic oligonucleotide
agggucggaacccaagcuuagaacu

SEQ ID NO: 234 - RNA, 25 nt, Artificial Sequence
  Description of Artificial Sequence: Synthetic oligonucleotide
ucggaacccaagcuuagaacuuuaa

SEQ ID NO: 235 - RNA, 25 nt, Artificial Sequence
  Description of Artificial Sequence: Synthetic oligonucleotide
acccaagcuuagaacuuuaagcaac

SEQ ID NO: 236 - RNA, 25 nt, Artificial Sequence
  Description of Artificial Sequence: Synthetic oligonucleotide
gaacuuuaagcaacaagaccaccac

SEQ ID NO: 237 - RNA, 25 nt, Artificial Sequence
  Description of Artificial Sequence: Synthetic oligonucleotide
acuauucaguggcgagaaauaaagu

SEQ ID NO: 238 - RNA, 25 nt, Artificial Sequence
  Description of Artificial Sequence: Synthetic oligonucleotide
cuauucaguggcgagaaauaaaguu

SEQ ID NO: 239 - RNA, 25 nt, Artificial Sequence
  Description of Artificial Sequence: Synthetic oligonucleotide
aaacacagauaacaggaaaugaucc

SEQ ID NO: 240 - RNA, 25 nt, Artificial Sequence
  Description of Artificial Sequence: Synthetic oligonucleotide
cuuaagaaaagagaagaaaugaaac

SEQ ID NO: 241 - RNA, 25 nt, Artificial Sequence
  Description of Artificial Sequence: Synthetic oligonucleotide
cugaaggaguguguuuccauccucc

SEQ ID NO: 242 - RNA, 25 nt, Artificial Sequence
  Description of Artificial Sequence: Synthetic oligonucleotide
ucaccgcgggacugaaaaucuuuga

SEQ ID NO: 243 - RNA, 25 nt, Artificial Sequence
  Description of Artificial Sequence: Synthetic oligonucleotide
agcagaaauaagcgugccguucagg

SEQ ID NO: 244 - RNA, 25 nt, Artificial Sequence
  Description of Artificial Sequence: Synthetic oligonucleotide
aagcgugccguucaggguccagaag

SEQ ID NO: 245 - RNA, 25 nt, Artificial Sequence
  Description of Artificial Sequence: Synthetic oligonucleotide
agaaacagucacucaagacugcuug

SEQ ID NO: 246 - RNA, 25 nt, Artificial Sequence
  Description of Artificial Sequence: Synthetic oligonucleotide
agaggaagaagguccaugucuuugg

SEQ ID NO: 247 - RNA, 25 nt, Artificial Sequence
  Description of Artificial Sequence: Synthetic oligonucleotide
uguauucaaaauaugccugaaacac

SEQ ID NO: 248 - RNA, 25 nt, Artificial Sequence
  Description of Artificial Sequence: Synthetic oligonucleotide
auuuuccucccuuucucuguaccuc

SEQ ID NO: 249 - RNA, 25 nt, Artificial Sequence
  Description of Artificial Sequence: Synthetic oligonucleotide
caaagaaagauagagcaagacaaga

SEQ ID NO: 250 - RNA, 25 nt, Artificial Sequence
  Description of Artificial Sequence: Synthetic oligonucleotide
aagaaagauagagcaagacaagaaa

SEQ ID NO: 251 - RNA, 25 nt, Artificial Sequence
  Description of Artificial Sequence: Synthetic oligonucleotide
gaaagcauuuguuuguacaagaucc

SEQ ID NO: 252 - RNA, 25 nt, Artificial Sequence
  Description of Artificial Sequence: Synthetic oligonucleotide
ugaguuaaacgaacguacuugcaga

SEQ ID NO: 253 - RNA, 25 nt, Artificial Sequence
  Description of Artificial Sequence: Synthetic oligonucleotide
acugauacagaacgaucgauacaga

SEQ ID NO: 254 - RNA, 25 nt, Artificial Sequence
  Description of Artificial Sequence: Synthetic oligonucleotide
auauuauauauauauaaaaauaaau

SEQ ID NO: 255 - RNA, 25 nt, Artificial Sequence
  Description of Artificial Sequence: Synthetic oligonucleotide
auuauauauauauaaaaauaaauau

SEQ ID NO: 256 - RNA, 25 nt, Artificial Sequence
  Description of Artificial Sequence: Synthetic oligonucleotide
ucacuggauguauuugacugcugug

SEQ ID NO: 257 - RNA, 25 nt, Artificial Sequence
  Description of Artificial Sequence: Synthetic oligonucleotide
cagggaagaggaggagaugagagac

SEQ ID NO: 258 - RNA, 25 nt, Artificial Sequence
  Description of Artificial Sequence: Synthetic oligonucleotide
augaucuuuuuuuugucccacuugg

SEQ ID NO: 259 - RNA, 27 nt, Artificial Sequence
  Description of Artificial Sequence: Synthetic oligonucleotide
ggccgugaacuccucaucaaaauaccu

SEQ ID NO: 260 - RNA, 27 nt, Artificial Sequence
  Description of Artificial Sequence: Synthetic oligonucleotide
uggugugauggugaucaucugggccgu

SEQ ID NO: 261 - RNA, 27 nt, Artificial Sequence
  Description of Artificial Sequence: Synthetic oligonucleotide
aaacccgcaggauaguuuucuucccua

SEQ ID NO: 262 - RNA, 27 nt, Artificial Sequence
  Description of Artificial Sequence: Synthetic oligonucleotide
caaacuggaugaaauaaauuaaaaccc

SEQ ID NO: 263 - RNA, 27 nt, Artificial Sequence
  Description of Artificial Sequence: Synthetic oligonucleotide
agaaguccuuaacauuucccuacguga

SEQ ID NO: 264 - RNA, 27 nt, Artificial Sequence
  Description of Artificial Sequence: Synthetic oligonucleotide
cucugucccacuggguaaacccuggcc

SEQ ID NO: 265 - RNA, 27 nt, Artificial Sequence
  Description of Artificial Sequence: Synthetic oligonucleotide
cacaauaacaaauuuaaaccuugcucc

SEQ ID NO: 266 - RNA, 27 nt, Artificial Sequence
  Description of Artificial Sequence: Synthetic oligonucleotide
aaaugcauuugaacaacauaauacaca

SEQ ID NO: 267 - RNA, 27 nt, Artificial Sequence
  Description of Artificial Sequence: Synthetic oligonucleotide
ggcuuuccugucacaaagauuaaaaac

SEQ ID NO: 268 - RNA, 27 nt, Artificial Sequence
  Description of Artificial Sequence: Synthetic oligonucleotide
agggcuuuccugucacaaagauuaaaa

SEQ ID NO: 269 - RNA, 27 nt, Artificial Sequence
  Description of Artificial Sequence: Synthetic oligonucleotide
ggccaugcugggagacauaagcagcag

SEQ ID NO: 270 - RNA, 27 nt, Artificial Sequence
  Description of Artificial Sequence: Synthetic oligonucleotide
ucagggagaagcuucugaaacacuucu

SEQ ID NO: 271 - RNA, 27 nt, Artificial Sequence
  Description of Artificial Sequence: Synthetic oligonucleotide
aagggcuucuuccuuauugauggucag

SEQ ID NO: 272 - RNA, 27 nt, Artificial Sequence
  Description of Artificial Sequence: Synthetic oligonucleotide
ugaagggcuucuuccuuauugaugguc

SEQ ID NO: 273 - RNA, 27 nt, Artificial Sequence
  Description of Artificial Sequence: Synthetic oligonucleotide
cgcugaagggcuucuuccuuauugaug

SEQ ID NO: 274 - RNA, 27 nt, Artificial Sequence
  Description of Artificial Sequence: Synthetic oligonucleotide
gccgcugaagggcuucuuccuuauuga

SEQ ID NO: 275 - RNA, 27 nt, Artificial Sequence
  Description of Artificial Sequence: Synthetic oligonucleotide
acuggccgcugaagggcuucuuccuua

SEQ ID NO: 276 - RNA, 27 nt, Artificial Sequence
  Description of Artificial Sequence: Synthetic oligonucleotide
cggagcuuuucaccuuuaguuaugcuu

SEQ ID NO: 277 - RNA, 27 nt, Artificial Sequence
  Description of Artificial Sequence: Synthetic oligonucleotide
ccggagcuuuucaccuuuaguuaugcu

SEQ ID NO: 278 - RNA, 27 nt, Artificial Sequence
  Description of Artificial Sequence: Synthetic oligonucleotide
cagacuguugacuggcgugauguaguu

SEQ ID NO: 279 - RNA, 27 nt, Artificial Sequence
  Description of Artificial Sequence: Synthetic oligonucleotide
cuuuugaacucugcuuaaauccagugg

SEQ ID NO: 280 - RNA, 27 nt, Artificial Sequence
  Description of Artificial Sequence: Synthetic oligonucleotide
gcuuuugaacucugcuuaaauccagug

SEQ ID NO: 281 - RNA, 27 nt, Artificial Sequence
  Description of Artificial Sequence: Synthetic oligonucleotide
agggcuuuugaacucugcuuaaaucca

SEQ ID NO: 282 - RNA, 27 nt, Artificial Sequence
  Description of Artificial Sequence: Synthetic oligonucleotide
aagggcuuuugaacucugcuuaaaucc

SEQ ID NO: 283 - RNA, 27 nt, Artificial Sequence
  Description of Artificial Sequence: Synthetic oligonucleotide
ugaagggcuuuugaacucugcuuaaau

SEQ ID NO: 284 - RNA, 27 nt, Artificial Sequence
  Description of Artificial Sequence: Synthetic oligonucleotide
cugaagggcuuuugaacucugcuuaaa

SEQ ID NO: 285 - RNA, 27 nt, Artificial Sequence
  Description of Artificial Sequence: Synthetic oligonucleotide
cgcugaagggcuuuugaacucugcuua

SEQ ID NO: 286 - RNA, 27 nt, Artificial Sequence
  Description of Artificial Sequence: Synthetic oligonucleotide
cgagcggcuucacucagacccugaggc

SEQ ID NO: 287 - RNA, 27 nt, Artificial Sequence
  Description of Artificial Sequence: Synthetic oligonucleotide
uugacuggcgugauguaguugcuuggg

SEQ ID NO: 288 - RNA, 27 nt, Artificial Sequence
  Description of Artificial Sequence: Synthetic oligonucleotide
cacgcaccaagaagcugccauugaucc

SEQ ID NO: 289 - RNA, 27 nt, Artificial Sequence
  Description of Artificial Sequence: Synthetic oligonucleotide
cugaugaauccaaugugggcuggaauc

SEQ ID NO: 290 - RNA, 27 nt, Artificial Sequence
  Description of Artificial Sequence: Synthetic oligonucleotide
cuuagguauuccacauucucagcugug

SEQ ID NO: 291 - RNA, 27 nt, Artificial Sequence
  Description of Artificial Sequence: Synthetic oligonucleotide
ugagccucaaauuaggagauacguuuu

SEQ ID NO: 292 - RNA, 27 nt, Artificial Sequence
  Description of Artificial Sequence: Synthetic oligonucleotide
ccaauuguagagaaauuauuuuaggaa

SEQ ID NO: 293 - RNA, 27 nt, Artificial Sequence
  Description of Artificial Sequence: Synthetic oligonucleotide
ggcuccuaacuagcugaaucuuccaau

SEQ ID NO: 294 - RNA, 27 nt, Artificial Sequence
  Description of Artificial Sequence: Synthetic oligonucleotide
guggauauugacuaggagaguuuaaaa

SEQ ID NO: 295 - RNA, 27 nt, Artificial Sequence
  Description of Artificial Sequence: Synthetic oligonucleotide
ugugacugaacauaacuguaggcugaa

SEQ ID NO: 296 - RNA, 27 nt, Artificial Sequence
  Description of Artificial Sequence: Synthetic oligonucleotide
guaugugugugugacugaacauaacug

SEQ ID NO: 297 - RNA, 27 nt, Artificial Sequence
  Description of Artificial Sequence: Synthetic oligonucleotide
aagcaaaaggaacauuuuguaugugug

SEQ ID NO: 298 - RNA, 27 nt, Artificial Sequence
  Description of Artificial Sequence: Synthetic oligonucleotide
aaaaauuacuuuaaaagcaaaaggaac

SEQ ID NO: 299 - RNA, 27 nt, Artificial Sequence
  Description of Artificial Sequence: Synthetic oligonucleotide
ccauugacuguugcuucacaggucaga

SEQ ID NO: 300 - RNA, 27 nt, Artificial Sequence
  Description of Artificial Sequence: Synthetic oligonucleotide
auugguuugucgaugugugagauaguu

SEQ ID NO: 301 - RNA, 27 nt, Artificial Sequence
  Description of Artificial Sequence: Synthetic oligonucleotide
agugguagcaguacaauugaggacaag

SEQ ID NO: 302 - RNA, 27 nt, Artificial Sequence
  Description of Artificial Sequence: Synthetic oligonucleotide
uaagaccgcuugccagcuacgguuuca

SEQ ID NO: 303 - RNA, 27 nt, Artificial Sequence
  Description of Artificial Sequence: Synthetic oligonucleotide
agccgguaagaccgcuugccagcuacg

SEQ ID NO: 304 - RNA, 27 nt, Artificial Sequence
  Description of Artificial Sequence: Synthetic oligonucleotide
gguaacccaucuuuuaaccauacaacu

SEQ ID NO: 305 - RNA, 27 nt, Artificial Sequence
  Description of Artificial Sequence: Synthetic oligonucleotide
ucgcagguaacccaucuuuuaaccaua

SEQ ID NO: 306 - RNA, 27 nt, Artificial Sequence
  Description of Artificial Sequence: Synthetic oligonucleotide
cucagcaagauuguauaauucccugca

SEQ ID NO: 307 - RNA, 27 nt, Artificial Sequence
  Description of Artificial Sequence: Synthetic oligonucleotide
acuguuuuaugcucagcaagauuguau

SEQ ID NO: 308 - RNA, 27 nt, Artificial Sequence
  Description of Artificial Sequence: Synthetic oligonucleotide
aggauaaaggacucuucauuauuggaa

SEQ ID NO: 309 - RNA, 27 nt, Artificial Sequence
  Description of Artificial Sequence: Synthetic oligonucleotide
caacuugcguuggaacauccaaagugu

SEQ ID NO: 310 - RNA, 27 nt, Artificial Sequence
  Description of Artificial Sequence: Synthetic oligonucleotide
augguuucaguuuaguggaagcauuua

SEQ ID NO: 311 - RNA, 27 nt, Artificial Sequence
  Description of Artificial Sequence: Synthetic oligonucleotide
auauuuaacaaagucaaacuuucucac

SEQ ID NO: 312 - RNA, 27 nt, Artificial Sequence
  Description of Artificial Sequence: Synthetic oligonucleotide
aacuuuuaauauacaguaguucuuuuc

SEQ ID NO: 313 - RNA, 27 nt, Artificial Sequence
  Description of Artificial Sequence: Synthetic oligonucleotide
guuaagucaaaacccguauuucuaaag

SEQ ID NO: 314 - RNA, 27 nt, Artificial Sequence
  Description of Artificial Sequence: Synthetic oligonucleotide
gugcugaguuugcuguacccauguuga

SEQ ID NO: 315 - RNA, 27 nt, Artificial Sequence
  Description of Artificial Sequence: Synthetic oligonucleotide
ugaggucagcaucuucugugucuuuac

SEQ ID NO: 316 - RNA, 27 nt, Artificial Sequence
  Description of Artificial Sequence: Synthetic oligonucleotide
gcgaucugaauaaaccucccuacuagc

SEQ ID NO: 317 - RNA, 27 nt, Artificial Sequence
  Description of Artificial Sequence: Synthetic oligonucleotide
aucccagaacccugcugcagaaggcca

SEQ ID NO: 318 - RNA, 27 nt, Artificial Sequence
  Description of Artificial Sequence: Synthetic oligonucleotide
cauaauuuccaauauguaccagaccuu

SEQ ID NO: 319 - RNA, 27 nt, Artificial Sequence
  Description of Artificial Sequence: Synthetic oligonucleotide
cuagugcuuccaucggaaggacuaggu

SEQ ID NO: 320 - RNA, 27 nt, Artificial Sequence
  Description of Artificial Sequence: Synthetic oligonucleotide
uccacauaaaaacaauauucacuggga

SEQ ID NO: 321 - RNA, 27 nt, Artificial Sequence
  Description of Artificial Sequence: Synthetic oligonucleotide
ucuaccaauuccaacuugaauucauug

SEQ ID NO: 322 - RNA, 27 nt, Artificial Sequence
  Description of Artificial Sequence: Synthetic oligonucleotide
ucuccaagucuaaaucuguguccugag

SEQ ID NO: 323 - RNA, 27 nt, Artificial Sequence
  Description of Artificial Sequence: Synthetic oligonucleotide
uggaauacuguaacugugcuuugagga

SEQ ID NO: 324 - RNA, 27 nt, Artificial Sequence
  Description of Artificial Sequence: Synthetic oligonucleotide
uuaauucaucagugguggcagugguag

SEQ ID NO: 325 - RNA, 27 nt, Artificial Sequence
  Description of Artificial Sequence: Synthetic oligonucleotide
gugaugauguggcacuaguaguuucuu

SEQ ID NO: 326 - RNA, 27 nt, Artificial Sequence
  Description of Artificial Sequence: Synthetic oligonucleotide
ucuguuuggugaggcuguccgacuuug

SEQ ID NO: 327 - RNA, 27 nt, Artificial Sequence
  Description of Artificial Sequence: Synthetic oligonucleotide
ccaucauguuccauuuuucgcuuucuc

SEQ ID NO: 328 - RNA, 27 nt, Artificial Sequence
  Description of Artificial Sequence: Synthetic oligonucleotide
gcagucuacaugcuaaaucagagggua

SEQ ID NO: 329 - RNA, 27 nt, Artificial Sequence
  Description of Artificial Sequence: Synthetic oligonucleotide
cauaaauagauccuuaaauagcucaaa

SEQ ID NO: 330 - RNA, 27 nt, Artificial Sequence
  Description of Artificial Sequence: Synthetic oligonucleotide
ugauaauagugcuuuuucaccuuuuuc

SEQ ID NO: 331 - RNA, 27 nt, Artificial Sequence
  Description of Artificial Sequence: Synthetic oligonucleotide
gcagaacugauaauagugcuuuuucac

SEQ ID NO: 332 - RNA, 27 nt, Artificial Sequence
  Description of Artificial Sequence: Synthetic oligonucleotide
guagguuuaaucuuucuuuucagccau

SEQ ID NO: 333 - RNA, 27 nt, Artificial Sequence
  Description of Artificial Sequence: Synthetic oligonucleotide
agaaggauuuuauuauaaggguuuaau

SEQ ID NO: 334 - RNA, 27 nt, Artificial Sequence
  Description of Artificial Sequence: Synthetic oligonucleotide
gucuacagcauuggcuaauaguaugaa

SEQ ID NO: 335 - RNA, 27 nt, Artificial Sequence
  Description of Artificial Sequence: Synthetic oligonucleotide
cuauuccuaucaaaaugcuucugucua

SEQ ID NO: 336 - RNA, 27 nt, Artificial Sequence
  Description of Artificial Sequence: Synthetic oligonucleotide
ucagggccauuaucuuauuugcucuau

SEQ ID NO: 337 - RNA, 27 nt, Artificial Sequence
  Description of Artificial Sequence: Synthetic oligonucleotide
ugcuugaggaagagaaaaauguugguc

SEQ ID NO: 338 - RNA, 27 nt, Artificial Sequence
  Description of Artificial Sequence: Synthetic oligonucleotide
ugggcugaacuuuucucauacuuaaag

SEQ ID NO: 339 - RNA, 27 nt, Artificial Sequence
  Description of Artificial Sequence: Synthetic oligonucleotide
gguucagcagccaucuuuauuccugcg

SEQ ID NO: 340 - RNA, 27 nt, Artificial Sequence
  Description of Artificial Sequence: Synthetic oligonucleotide
ugaagagaacuuggucauucaaauuuc

SEQ ID NO: 341 - RNA, 27 nt, Artificial Sequence
  Description of Artificial Sequence: Synthetic oligonucleotide
cucuaggcuggcuaucuuuauacauac

SEQ ID NO: 342 - RNA, 27 nt, Artificial Sequence
  Description of Artificial Sequence: Synthetic oligonucleotide
acacuucacagagauaguuacagccau

SEQ ID NO: 343 - RNA, 27 nt, Artificial Sequence
  Description of Artificial Sequence: Synthetic oligonucleotide
uugaaauuuucucacacuucacagaga

SEQ ID NO: 344 - RNA, 27 nt, Artificial Sequence
  Description of Artificial Sequence: Synthetic oligonucleotide
ucaggaggauucauuuccuuaaaggaa

SEQ ID NO: 345 - RNA, 27 nt, Artificial Sequence
  Description of Artificial Sequence: Synthetic oligonucleotide
auaugaugucacuuuuuguauccuuga

SEQ ID NO: 346 - RNA, 27 nt, Artificial Sequence
  Description of Artificial Sequence: Synthetic oligonucleotide
uaugaugaagauucaaauugcaucuua

SEQ ID NO: 347 - RNA, 27 nt, Artificial Sequence
  Description of Artificial Sequence: Synthetic oligonucleotide
uuaauagcuagucuucguuuugaacag

SEQ ID NO: 348 - RNA, 27 nt, Artificial Sequence
  Description of Artificial Sequence: Synthetic oligonucleotide
auuuuuaguagagaugagguuucacca

SEQ ID NO: 349 - RNA, 27 nt, Artificial Sequence
  Description of Artificial Sequence: Synthetic oligonucleotide
aggcgagauagagcuucucuuucguuc

SEQ ID NO: 350 - RNA, 27 nt, Artificial Sequence
  Description of Artificial Sequence: Synthetic oligonucleotide
aacuggaccgaaggcgcuuguggagaa

SEQ ID NO: 351 - RNA, 27 nt, Artificial Sequence
  Description of Artificial Sequence: Synthetic oligonucleotide
gcggcuacaucuuuggaaucuucuccu

SEQ ID NO: 352 - RNA, 27 nt, Artificial Sequence
  Description of Artificial Sequence: Synthetic oligonucleotide
caagucuccucauugaauccagauugg

SEQ ID NO: 353 - RNA, 27 nt, Artificial Sequence
  Description of Artificial Sequence: Synthetic oligonucleotide
uccucacuacucucaaaucuguucugg

SEQ ID NO: 354 - RNA, 27 nt, Artificial Sequence
  Description of Artificial Sequence: Synthetic oligonucleotide
uuuguacucaucugcacagcucuggcu

SEQ ID NO: 355 - RNA, 27 nt, Artificial Sequence
  Description of Artificial Sequence: Synthetic oligonucleotide
gcccauuaacaacaacaaucugaggug

SEQ ID NO: 356 - RNA, 27 nt, Artificial Sequence
  Description of Artificial Sequence: Synthetic oligonucleotide
aauaaauuaaaaauaauuaaaauagug

SEQ ID NO: 357 - RNA, 27 nt, Artificial Sequence
  Description of Artificial Sequence: Synthetic oligonucleotide
cauauuuaaauauuaauaaauuaaaaa

SEQ ID NO: 358 - RNA, 27 nt, Artificial Sequence
  Description of Artificial Sequence: Synthetic oligonucleotide
gaaacaaaggauauucaaacugcauag

SEQ ID NO: 359 - RNA, 27 nt, Artificial Sequence
  Description of Artificial Sequence: Synthetic oligonucleotide
caaacacuuagacgccagcagcauggg

SEQ ID NO: 360 - RNA, 27 nt, Artificial Sequence
  Description of Artificial Sequence: Synthetic oligonucleotide
uuugucacaggugaaaugcacaucuga

SEQ ID NO: 361 - RNA, 27 nt, Artificial Sequence
  Description of Artificial Sequence: Synthetic oligonucleotide
uaauucagccuggcacagguuuugauc

SEQ ID NO: 362 - RNA, 27 nt, Artificial Sequence
  Description of Artificial Sequence: Synthetic oligonucleotide
auuguaagaaugacuacccacauucac

SEQ ID NO: 363 - RNA, 27 nt, Artificial Sequence
  Description of Artificial Sequence: Synthetic oligonucleotide
caauuguaagaaugacuacccacauuc

SEQ ID NO: 364 - RNA, 27 nt, Artificial Sequence
  Description of Artificial Sequence: Synthetic oligonucleotide
guacacucucugaugcucauuuucaua

SEQ ID NO: 365 - RNA, 27 nt, Artificial Sequence
  Description of Artificial Sequence: Synthetic oligonucleotide
cugcugaguucuacaugaaaagcaaau

SEQ ID NO: 366 - RNA, 27 nt, Artificial Sequence
  Description of Artificial Sequence: Synthetic oligonucleotide
uacugaaaauaaauauagaaauacaac

SEQ ID NO: 367 - RNA, 27 nt, Artificial Sequence
  Description of Artificial Sequence: Synthetic oligonucleotide
uuccauuuaagaaacauuaaucaaaac

SEQ ID NO: 368 - RNA, 27 nt, Artificial Sequence
  Description of Artificial Sequence: Synthetic oligonucleotide
acaauuuuaggcacuauacacguuguu

SEQ ID NO: 369 - RNA, 27 nt, Artificial Sequence
  Description of Artificial Sequence: Synthetic oligonucleotide
ccagauguuaguagccaaggauauggu

SEQ ID NO: 370 - RNA, 27 nt, Artificial Sequence
  Description of Artificial Sequence: Synthetic oligonucleotide
agcucacagucuccagauguuaguagc

SEQ ID NO: 371 - RNA, 27 nt, Artificial Sequence
  Description of Artificial Sequence: Synthetic oligonucleotide
auuaauaaaaagcacacaacuuauggc

SEQ ID NO: 372 - RNA, 27 nt, Artificial Sequence
  Description of Artificial Sequence: Synthetic oligonucleotide
aauguaagaagagccaaaaugaugcau

SEQ ID NO: 373 - RNA, 27 nt, Artificial Sequence
  Description of Artificial Sequence: Synthetic oligonucleotide
acauuuuuacaaauguaagaagagcca

SEQ ID NO: 374 - RNA, 27 nt, Artificial Sequence
  Description of Artificial Sequence: Synthetic oligonucleotide
aauaugaauuaagaugaccuaaucugu

SEQ ID NO: 375 - RNA, 27 nt, Artificial Sequence
  Description of Artificial Sequence: Synthetic oligonucleotide
ucaugauuaguucuuucaauuccaucc

SEQ ID NO: 376 - RNA, 27 nt, Artificial Sequence
  Description of Artificial Sequence: Synthetic oligonucleotide
cccaagagcagaaggaaugagugugca

SEQ ID NO: 377 - RNA, 27 nt, Artificial Sequence
  Description of Artificial Sequence: Synthetic oligonucleotide
cucaaagcuacugguuaccucuacacc

SEQ ID NO: 378 - RNA, 27 nt, Artificial Sequence
  Description of Artificial Sequence: Synthetic oligonucleotide
ugaaauauuacguggcaugugguuggg

SEQ ID NO: 379 - RNA, 27 nt, Artificial Sequence
  Description of Artificial Sequence: Synthetic oligonucleotide
agugaagagaauaacuuguuuccgaag

SEQ ID NO: 380 - RNA, 27 nt, Artificial Sequence
  Description of Artificial Sequence: Synthetic oligonucleotide
uuucuuagcauuaguuauugggaguga

SEQ ID NO: 381 - RNA, 27 nt, Artificial Sequence
  Description of Artificial Sequence: Synthetic oligonucleotide
uugauuuucagcauuucuuagcauuag

SEQ ID NO: 382 - RNA, 27 nt, Artificial Sequence
  Description of Artificial Sequence: Synthetic oligonucleotide
aaaguaaucauauuuagagaaagacag

SEQ ID NO: 383 - RNA, 27 nt, Artificial Sequence
  Description of Artificial Sequence: Synthetic oligonucleotide
uguagaacaaaaugccugaaauucagc

SEQ ID NO: 384 - RNA, 27 nt, Artificial Sequence
  Description of Artificial Sequence: Synthetic oligonucleotide
gagagucccgggugagagggaaucgcc

SEQ ID NO: 385 - RNA, 27 nt, Artificial Sequence
  Description of Artificial Sequence: Synthetic oligonucleotide
cuuuacuuuaaagguucacuuuccuug

SEQ ID NO: 386 - RNA, 27 nt, Artificial Sequence
  Description of Artificial Sequence: Synthetic oligonucleotide
ccaggcuuccagagcaugcagccuccu

SEQ ID NO: 387 - RNA, 27 nt, Artificial Sequence
  Description of Artificial Sequence: Synthetic oligonucleotide
cucucuuuuguuuucuguucagagaaa

SEQ ID NO: 388 - RNA, 27 nt, Artificial Sequence
  Description of Artificial Sequence: Synthetic oligonucleotide
cggcauaacugauuacagccaaguuca

SEQ ID NO: 389 - RNA, 27 nt, Artificial Sequence
  Description of Artificial Sequence: Synthetic oligonucleotide
uggacuucuuuuaauuuuggcuucuuc

SEQ ID NO: 390 - RNA, 27 nt, Artificial Sequence
  Description of Artificial Sequence: Synthetic oligonucleotide
uaaccucaccuggacuucuuuuaauuu

SEQ ID NO: 391 - RNA, 27 nt, Artificial Sequence
  Description of Artificial Sequence: Synthetic oligonucleotide
guccucuucccgauaauccggauucag

SEQ ID NO: 392 - RNA, 27 nt, Artificial Sequence
  Description of Artificial Sequence: Synthetic oligonucleotide
acaauacuugcuuugaugucacauuaa

SEQ ID NO: 393 - RNA, 27 nt, Artificial Sequence
  Description of Artificial Sequence: Synthetic oligonucleotide
gagugcuacaauacuugcuuugauguc

SEQ ID NO: 394 - RNA, 27 nt, Artificial Sequence
  Description of Artificial Sequence: Synthetic oligonucleotide
auuugugguuuuguuuucucucucucu

SEQ ID NO: 395 - RNA, 27 nt, Artificial Sequence
  Description of Artificial Sequence: Synthetic oligonucleotide
uguaugggcuuaaauacuacagcgagg

SEQ ID NO: 396 - RNA, 27 nt, Artificial Sequence
  Description of Artificial Sequence: Synthetic oligonucleotide
cuguaugggcuuaaauacuacagcgag

SEQ ID NO: 397 - RNA, 27 nt, Artificial Sequence
  Description of Artificial Sequence: Synthetic oligonucleotide
ggaagguuucuguaugggcuuaaauac

SEQ ID NO: 398 - RNA, 27 nt, Artificial Sequence
  Description of Artificial Sequence: Synthetic oligonucleotide
guagguauaccauguuuauuuuaauac

SEQ ID NO: 399 - RNA, 27 nt, Artificial Sequence
  Description of Artificial Sequence: Synthetic oligonucleotide
uccgaaaacuggccgaucagaacagcc

SEQ ID NO: 400 - RNA, 27 nt, Artificial Sequence
  Description of Artificial Sequence: Synthetic oligonucleotide
cccuguuccaaaguucaaauuauuugu

SEQ ID NO: 401 - RNA, 27 nt, Artificial Sequence
  Description of Artificial Sequence: Synthetic oligonucleotide
acuggaaaguuaaauuaaggucgcaau

SEQ ID NO: 402 - RNA, 27 nt, Artificial Sequence
  Description of Artificial Sequence: Synthetic oligonucleotide
caaaaccaaacuuuagcuuucucagcc

SEQ ID NO: 403 - RNA, 27 nt, Artificial Sequence
  Description of Artificial Sequence: Synthetic oligonucleotide
uacagugggaaguagcaucuuuacuuu

SEQ ID NO: 404 - RNA, 27 nt, Artificial Sequence
  Description of Artificial Sequence: Synthetic oligonucleotide
ucauaugguaucagcaauuaagcagua

SEQ ID NO: 405 - RNA, 27 nt, Artificial Sequence
  Description of Artificial Sequence: Synthetic oligonucleotide
cagcccauguuucauucauaugguauc

SEQ ID NO: 406 - RNA, 27 nt, Artificial Sequence
  Description of Artificial Sequence: Synthetic oligonucleotide
uaugaaaaaguuggauaagaaaguugg

SEQ ID NO: 407 - RNA, 27 nt, Artificial Sequence
  Description of Artificial Sequence: Synthetic oligonucleotide
uccggccucaugaugucaugcaaggcu

SEQ ID NO: 408 - RNA, 27 nt, Artificial Sequence
  Description of Artificial Sequence: Synthetic oligonucleotide
acaaaugcagucauauacaaauucagg

SEQ ID NO: 409 - RNA, 27 nt, Artificial Sequence
  Description of Artificial Sequence: Synthetic oligonucleotide
gguaguaaacauucuacuaggauucuu

SEQ ID NO: 410 - RNA, 27 nt, Artificial Sequence
  Description of Artificial Sequence: Synthetic oligonucleotide
uuucaucaaaaaauucuucccuuucug

SEQ ID NO: 411 - RNA, 27 nt, Artificial Sequence
  Description of Artificial Sequence: Synthetic oligonucleotide
aaauucacacacuggcaugccgauagc

SEQ ID NO: 412 - RNA, 27 nt, Artificial Sequence
  Description of Artificial Sequence: Synthetic oligonucleotide
acauacauugcucuacuaugaggugaa

SEQ ID NO: 413 - RNA, 27 nt, Artificial Sequence
  Description of Artificial Sequence: Synthetic oligonucleotide
uauauaugugcuuuggcaauucuggug

SEQ ID NO: 414 - RNA, 27 nt, Artificial Sequence
  Description of Artificial Sequence: Synthetic oligonucleotide
ggagaaacuauuacccagaucaccacu

SEQ ID NO: 415 - RNA, 27 nt, Artificial Sequence
  Description of Artificial Sequence: Synthetic oligonucleotide
auuuggagaaacuauuacccagaucac

SEQ ID NO: 416 - RNA, 27 nt, Artificial Sequence
  Description of Artificial Sequence: Synthetic oligonucleotide
uuucuaggaaguauucaucacauccac

SEQ ID NO: 417 - RNA, 27 nt, Artificial Sequence
  Description of Artificial Sequence: Synthetic oligonucleotide
cauauaugguguagcuguggaaaugcg

SEQ ID NO: 418 - RNA, 27 nt, Artificial Sequence
  Description of Artificial Sequence: Synthetic oligonucleotide
cuccauucauauaugguguagcugugg

SEQ ID NO: 419 - RNA, 27 nt, Artificial Sequence
  Description of Artificial Sequence: Synthetic oligonucleotide
aucuucuucucguguaagaacugcagc

SEQ ID NO: 420 - RNA, 27 nt, Artificial Sequence
  Description of Artificial Sequence: Synthetic oligonucleotide
ucccuguaaaugaucuucuucucgugu

SEQ ID NO: 421 - RNA, 27 nt, Artificial Sequence
  Description of Artificial Sequence: Synthetic oligonucleotide
gucccuguaaaugaucuucuucucgug

SEQ ID NO: 422 - RNA, 27 nt, Artificial Sequence
  Description of Artificial Sequence: Synthetic oligonucleotide
ucaggucccuguaaaugaucuucuucu

SEQ ID NO: 423 - RNA, 27 nt, Artificial Sequence
  Description of Artificial Sequence: Synthetic oligonucleotide
gaugcagucaaacaccucuuccucugu

SEQ ID NO: 424 - RNA, 27 nt, Artificial Sequence
  Description of Artificial Sequence: Synthetic oligonucleotide
cgaugcagucaaacaccucuuccucug

SEQ ID NO: 425 - RNA, 27 nt, Artificial Sequence
  Description of Artificial Sequence: Synthetic oligonucleotide
cccugugaacucgcccucaaaguagcg

SEQ ID NO: 426 - RNA, 27 nt, Artificial Sequence
  Description of Artificial Sequence: Synthetic oligonucleotide
ggacagaggugccaggagaugcccuca

SEQ ID NO: 427 - RNA, 27 nt, Artificial Sequence
  Description of Artificial Sequence: Synthetic oligonucleotide
uuaaaaagacaaaccauaucacuccuu

SEQ ID NO: 428 - RNA, 27 nt, Artificial Sequence
  Description of Artificial Sequence: Synthetic oligonucleotide
cuuaaaaagacaaaccauaucacuccu

SEQ ID NO: 429 - RNA, 27 nt, Artificial Sequence
  Description of Artificial Sequence: Synthetic oligonucleotide
gacaaccuuuaggaucuuuacugcaac

SEQ ID NO: 430 - RNA, 27 nt, Artificial Sequence
  Description of Artificial Sequence: Synthetic oligonucleotide
gucgacaaccuuuaggaucuuuacugc

SEQ ID NO: 431 - RNA, 27 nt, Artificial Sequence
  Description of Artificial Sequence: Synthetic oligonucleotide
acaauugccagguuguccuuugucaug

SEQ ID NO: 432 - RNA, 27 nt, Artificial Sequence
  Description of Artificial Sequence: Synthetic oligonucleotide
ccucgcaccacugggucacaauugcca

SEQ ID NO: 433 - RNA, 27 nt, Artificial Sequence
  Description of Artificial Sequence: Synthetic oligonucleotide
auuucaugucucuauggaugauguucu

SEQ ID NO: 434 - RNA, 27 nt, Artificial Sequence
  Description of Artificial Sequence: Synthetic oligonucleotide
uggagaaauauauuguuggauuucaug

SEQ ID NO: 435 - RNA, 27 nt, Artificial Sequence
  Description of Artificial Sequence: Synthetic oligonucleotide
agccuucauggagaaauauauuguugg

SEQ ID NO: 436 - RNA, 27 nt, Artificial Sequence
  Description of Artificial Sequence: Synthetic oligonucleotide
accacuccagcgugacuuuacuguugc

SEQ ID NO: 437 - RNA, 27 nt, Artificial Sequence
  Description of Artificial Sequence: Synthetic oligonucleotide
ccucucuuccuuuacuuucuucacaca

SEQ ID NO: 438 - RNA, 27 nt, Artificial Sequence
  Description of Artificial Sequence: Synthetic oligonucleotide
gcccgaugcaaggauggcucggaagcg

SEQ ID NO: 439 - RNA, 27 nt, Artificial Sequence
  Description of Artificial Sequence: Synthetic oligonucleotide
cacaguaggauauucaaccuccauuuc

SEQ ID NO: 440 - RNA, 27 nt, Artificial Sequence
  Description of Artificial Sequence: Synthetic oligonucleotide
uuacacaguaggauauucaaccuccau

SEQ ID NO: 441 - RNA, 27 nt, Artificial Sequence
  Description of Artificial Sequence: Synthetic oligonucleotide
uacacuacaagggaaaacucaaaaucu

SEQ ID NO: 442 - RNA, 27 nt, Artificial Sequence
  Description of Artificial Sequence: Synthetic oligonucleotide
caaucaacaaagaacaaacaggauaaa

SEQ ID NO: 443 - RNA, 27 nt, Artificial Sequence
  Description of Artificial Sequence: Synthetic oligonucleotide
uuucaaucaacaaagaacaaacaggau

SEQ ID NO: 444 - RNA, 27 nt, Artificial Sequence
  Description of Artificial Sequence: Synthetic oligonucleotide
auggaagaaaaagaaggcuguagagaa

SEQ ID NO: 445 - RNA, 27 nt, Artificial Sequence
  Description of Artificial Sequence: Synthetic oligonucleotide
uagaaggaagauuagcuauggaagaaa

SEQ ID NO: 446 - RNA, 27 nt, Artificial Sequence
  Description of Artificial Sequence: Synthetic oligonucleotide
augaagcauucaacaggaagauuauuu

SEQ ID NO: 447 - RNA, 27 nt, Artificial Sequence
  Description of Artificial Sequence: Synthetic oligonucleotide
caugaagcauucaacaggaagauuauu

SEQ ID NO: 448 - RNA, 27 nt, Artificial Sequence
  Description of Artificial Sequence: Synthetic oligonucleotide
ucaaaguagaauucaagucaugaagca

SEQ ID NO: 449 - RNA, 27 nt, Artificial Sequence
  Description of Artificial Sequence: Synthetic oligonucleotide
gucuguaguugcuucucucccucuuag

SEQ ID NO: 450 - RNA, 27 nt, Artificial Sequence
  Description of Artificial Sequence: Synthetic oligonucleotide
guugaccuuggucugguaggagacggc

SEQ ID NO: 451 - RNA, 27 nt, Artificial Sequence
  Description of Artificial Sequence: Synthetic oligonucleotide
gucgagauagucgggccgauugaucuc

SEQ ID NO: 452 - RNA, 27 nt, Artificial Sequence
  Description of Artificial Sequence: Synthetic oligonucleotide
guuugggaagguuggauguucguccuc

SEQ ID NO: 453 - RNA, 27 nt, Artificial Sequence
  Description of Artificial Sequence: Synthetic oligonucleotide
aguucuaagcuuggguuccgacccuaa

SEQ ID NO: 454 - RNA, 27 nt, Artificial Sequence
  Description of Artificial Sequence: Synthetic oligonucleotide
uuaaaguucuaagcuuggguuccgacc

SEQ ID NO: 455 - RNA, 27 nt, Artificial Sequence
  Description of Artificial Sequence: Synthetic oligonucleotide
guugcuuaaaguucuaagcuuggguuc

SEQ ID NO: 456 - RNA, 27 nt, Artificial Sequence
  Description of Artificial Sequence: Synthetic oligonucleotide
gugguggucuuguugcuuaaaguucua

SEQ ID NO: 457 - RNA, 27 nt, Artificial Sequence
  Description of Artificial Sequence: Synthetic oligonucleotide
acuuuauuucucgccacugaauaguag

SEQ ID NO: 458 - RNA, 27 nt, Artificial Sequence
  Description of Artificial Sequence: Synthetic oligonucleotide
aacuuuauuucucgccacugaauagua

SEQ ID NO: 459 - RNA, 27 nt, Artificial Sequence
  Description of Artificial Sequence: Synthetic oligonucleotide
ggaucauuuccuguuaucuguguuugu

SEQ ID NO: 460 - RNA, 27 nt, Artificial Sequence
  Description of Artificial Sequence: Synthetic oligonucleotide
guuucauuucuucucuuuucuuaaggc

SEQ ID NO: 461 - RNA, 27 nt, Artificial Sequence
  Description of Artificial Sequence: Synthetic oligonucleotide
ggaggauggaaacacacuccuucaguu

SEQ ID NO: 462 - RNA, 27 nt, Artificial Sequence
  Description of Artificial Sequence: Synthetic oligonucleotide
ucaaagauuuucagucccgcggugaca

SEQ ID NO: 463 - RNA, 27 nt, Artificial Sequence
  Description of Artificial Sequence: Synthetic oligonucleotide
ccugaacggcacgcuuauuucugcugu

SEQ ID NO: 464 - RNA, 27 nt, Artificial Sequence
  Description of Artificial Sequence: Synthetic oligonucleotide
cuucuggacccugaacggcacgcuuau

SEQ ID NO: 465 - RNA, 27 nt, Artificial Sequence
  Description of Artificial Sequence: Synthetic oligonucleotide
caagcagucuugagugacuguuucuuc

SEQ ID NO: 466 - RNA, 27 nt, Artificial Sequence
  Description of Artificial Sequence: Synthetic oligonucleotide
ccaaagacauggaccuucuuccucuga

SEQ ID NO: 467 - RNA, 27 nt, Artificial Sequence
  Description of Artificial Sequence: Synthetic oligonucleotide
guguuucaggcauauuuugaauacauc

SEQ ID NO: 468 - RNA, 27 nt, Artificial Sequence
  Description of Artificial Sequence: Synthetic oligonucleotide
gagguacagagaaagggaggaaaauag

SEQ ID NO: 469 - RNA, 27 nt, Artificial Sequence
  Description of Artificial Sequence: Synthetic oligonucleotide
ucuugucuugcucuaucuuucuuuggu

SEQ ID NO: 470 - RNA, 27 nt, Artificial Sequence
  Description of Artificial Sequence: Synthetic oligonucleotide
uuucuugucuugcucuaucuuucuuug

SEQ ID NO: 471 - RNA, 27 nt, Artificial Sequence
  Description of Artificial Sequence: Synthetic oligonucleotide
ggaucuuguacaaacaaaugcuuucuc

SEQ ID NO: 472 - RNA, 27 nt, Artificial Sequence
  Description of Artificial Sequence: Synthetic oligonucleotide
ucugcaaguacguucguuuaacucaag

SEQ ID NO: 473 - RNA, 27 nt, Artificial Sequence
  Description of Artificial Sequence: Synthetic oligonucleotide
ucuguaucgaucguucuguaucagucu

SEQ ID NO: 474 - RNA, 27 nt, Artificial Sequence
  Description of Artificial Sequence: Synthetic oligonucleotide
auuuauuuuuauauauauauaauauau

SEQ ID NO: 475 - RNA, 27 nt, Artificial Sequence
  Description of Artificial Sequence: Synthetic oligonucleotide
auauuuauuuuuauauauauauaauau

SEQ ID NO: 476 - RNA, 27 nt, Artificial Sequence
  Description of Artificial Sequence: Synthetic oligonucleotide
cacagcagucaaauacauccagugaag

SEQ ID NO: 477 - RNA, 27 nt, Artificial Sequence
  Description of Artificial Sequence: Synthetic oligonucleotide
gucucucaucuccuccucuucccuguc

SEQ ID NO: 478 - RNA, 27 nt, Artificial Sequence
  Description of Artificial Sequence: Synthetic oligonucleotide
ccaagugggacaaaaaaaagaucaugc

SEQ ID NO: 479 - RNA, 14 nt, Artificial Sequence
  Description of Artificial Sequence: Synthetic oligonucleotide
guauuuugaugagg

SEQ ID NO: 480 - RNA, 12 nt, Artificial Sequence
  Description of Artificial Sequence: Synthetic oligonucleotide
ggcccagaugau

SEQ ID NO: 481 - RNA, 14 nt, Artificial Sequence
  Description of Artificial Sequence: Synthetic oligonucleotide
gggaagaaaacuau

SEQ ID NO: 482 - RNA, 15 nt, Artificial Sequence
  Description of Artificial Sequence: Synthetic oligonucleotide
guuuuaauuuauuuc

SEQ ID NO: 483 - RNA, 12 nt, Artificial Sequence
  Description of Artificial Sequence: Synthetic oligonucleotide
acguagggaaau

SEQ ID NO: 484 - RNA, 12 nt, Artificial Sequence
  Description of Artificial Sequence: Synthetic oligonucleotide
ccaggguuuacc

SEQ ID NO: 485 - RNA, 11 nt, Artificial Sequence
  Description of Artificial Sequence: Synthetic oligonucleotide
agcaagguuua

SEQ ID NO: 486 - RNA, 12 nt, Artificial Sequence
  Description of Artificial Sequence: Synthetic oligonucleotide
uguauuauguug

SEQ ID NO: 487 - RNA, 15 nt, Artificial Sequence
  Description of Artificial Sequence: Synthetic oligonucleotide
uuuuaaucuuuguga

SEQ ID NO: 488 - RNA, 14 nt, Artificial Sequence
  Description of Artificial Sequence: Synthetic oligonucleotide
uuaaucuuugugac

SEQ ID NO: 489 - RNA, 13 nt, Artificial Sequence
  Description of Artificial Sequence: Synthetic oligonucleotide
gcugcuuaugucu

SEQ ID NO: 490 - RNA, 14 nt, Artificial Sequence
  Description of Artificial Sequence: Synthetic oligonucleotide
aaguguuucagaag

SEQ ID NO: 491 - RNA, 13 nt, Artificial Sequence
  Description of Artificial Sequence: Synthetic oligonucleotide
gaccaucaauaag

SEQ ID NO: 492 - RNA, 13 nt, Artificial Sequence
  Description of Artificial Sequence: Synthetic oligonucleotide
ccaucaauaagga

SEQ ID NO: 493 - RNA, 14 nt, Artificial Sequence
  Description of Artificial Sequence: Synthetic oligonucleotide
ucaauaaggaagaa

SEQ ID NO: 494 - RNA, 14 nt, Artificial Sequence
  Description of Artificial Sequence: Synthetic oligonucleotide
aauaaggaagaagc

SEQ ID NO: 495 - RNA, 13 nt, Artificial Sequence
  Description of Artificial Sequence: Synthetic oligonucleotide
aggaagaagcccu

SEQ ID NO: 496 - RNA, 13 nt, Artificial Sequence
  Description of Artificial Sequence: Synthetic oligonucleotide
gcauaacuaaagg

SEQ ID NO: 497 - RNA, 14 nt, Artificial Sequence
  Description of Artificial Sequence: Synthetic oligonucleotide
cauaacuaaaggug

SEQ ID NO: 498 - RNA, 12 nt, Artificial Sequence
  Description of Artificial Sequence: Synthetic oligonucleotide
cuacaucacgcc

SEQ ID NO: 499 - RNA, 12 nt, Artificial Sequence
  Description of Artificial Sequence: Synthetic oligonucleotide
acuggauuuaag

SEQ ID NO: 500 - RNA, 12 nt, Artificial Sequence
  Description of Artificial Sequence: Synthetic oligonucleotide
cuggauuuaagc

SEQ ID NO: 501 - RNA, 13 nt, Artificial Sequence
  Description of Artificial Sequence: Synthetic oligonucleotide
gauuuaagcagag

SEQ ID NO: 502 - RNA, 13 nt, Artificial Sequence
  Description of Artificial Sequence: Synthetic oligonucleotide
auuuaagcagagu

SEQ ID NO: 503 - RNA, 13 nt, Artificial Sequence
  Description of Artificial Sequence: Synthetic oligonucleotide
uuaagcagaguuc

SEQ ID NO: 504 - RNA, 13 nt, Artificial Sequence
  Description of Artificial Sequence: Synthetic oligonucleotide
uaagcagaguuca

SEQ ID NO: 505 - RNA, 14 nt, Artificial Sequence
  Description of Artificial Sequence: Synthetic oligonucleotide
agcagaguucaaaa

SEQ ID NO: 506 - RNA, 12 nt, Artificial Sequence
  Description of Artificial Sequence: Synthetic oligonucleotide
cucagggucuga

SEQ ID NO: 507 - RNA, 13 nt, Artificial Sequence
  Description of Artificial Sequence: Synthetic oligonucleotide
caagcaacuacau

SEQ ID NO: 508 - RNA, 12 nt, Artificial Sequence
  Description of Artificial Sequence: Synthetic oligonucleotide
aucaauggcagc

SEQ ID NO: 509 - RNA, 11 nt, Artificial Sequence
  Description of Artificial Sequence: Synthetic oligonucleotide
uuccagcccac

SEQ ID NO: 510 - RNA, 12 nt, Artificial Sequence
  Description of Artificial Sequence: Synthetic oligonucleotide
cagcugagaaug

SEQ ID NO: 511 - RNA, 13 nt, Artificial Sequence
  Description of Artificial Sequence: Synthetic oligonucleotide
aacguaucuccua

SEQ ID NO: 512 - RNA, 14 nt, Artificial Sequence
  Description of Artificial Sequence: Synthetic oligonucleotide
ccuaaaauaauuuc

SEQ ID NO: 513 - RNA, 13 nt, Artificial Sequence
  Description of Artificial Sequence: Synthetic oligonucleotide
uggaagauucagc

SEQ ID NO: 514 - RNA, 12 nt, Artificial Sequence
  Description of Artificial Sequence: Synthetic oligonucleotide
uuaaacucuccu

SEQ ID NO: 515 - RNA, 12 nt, Artificial Sequence
  Description of Artificial Sequence: Synthetic oligonucleotide
cagccuacaguu

SEQ ID NO: 516 - RNA, 13 nt, Artificial Sequence
  Description of Artificial Sequence: Synthetic oligonucleotide
guuauguucaguc

SEQ ID NO: 517 - RNA, 13 nt, Artificial Sequence
  Description of Artificial Sequence: Synthetic oligonucleotide
cacauacaaaaug

SEQ ID NO: 518 - RNA, 9 nt, Artificial Sequence
  Description of Artificial Sequence: Synthetic oligonucleotide
uccuuuugc

SEQ ID NO: 519 - RNA, 12 nt, Artificial Sequence
  Description of Artificial Sequence: Synthetic oligonucleotide
ugaccugugaag

SEQ ID NO: 520 - RNA, 12 nt, Artificial Sequence
  Description of Artificial Sequence: Synthetic oligonucleotide
cuaucucacaca

SEQ ID NO: 521 - RNA, 13 nt, Artificial Sequence
  Description of Artificial Sequence: Synthetic oligonucleotide
uguccucaauugu

SEQ ID NO: 522 - RNA, 12 nt, Artificial Sequence
  Description of Artificial Sequence: Synthetic oligonucleotide
aaaccguagcug

SEQ ID NO: 523 - RNA, 12 nt, Artificial Sequence
  Description of Artificial Sequence: Synthetic oligonucleotide
uagcuggcaagc

SEQ ID NO: 524 - RNA, 14 nt, Artificial Sequence
  Description of Artificial Sequence: Synthetic oligonucleotide
uuguaugguuaaaa

SEQ ID NO: 525 - RNA, 14 nt, Artificial Sequence
  Description of Artificial Sequence: Synthetic oligonucleotide
ugguuaaaagaugg

SEQ ID NO: 526 - RNA, 13 nt, Artificial Sequence
  Description of Artificial Sequence: Synthetic oligonucleotide
cagggaauuauac

SEQ ID NO: 527 - RNA, 12 nt, Artificial Sequence
  Description of Artificial Sequence: Synthetic oligonucleotide
acaaucuugcug

SEQ ID NO: 528 - RNA, 13 nt, Artificial Sequence
  Description of Artificial Sequence: Synthetic oligonucleotide
ccaauaaugaaga

SEQ ID NO: 529 - RNA, 13 nt, Artificial Sequence
  Description of Artificial Sequence: Synthetic oligonucleotide
acuuuggauguuc

SEQ ID NO: 530 - RNA, 12 nt, Artificial Sequence
  Description of Artificial Sequence: Synthetic oligonucleotide
aaugcuuccacu

SEQ ID NO: 531 - RNA, 11 nt, Artificial Sequence
  Description of Artificial Sequence: Synthetic oligonucleotide
gagaaaguuug

SEQ ID NO: 532 - RNA, 11 nt, Artificial Sequence
  Description of Artificial Sequence: Synthetic oligonucleotide
aaagaacuacu

SEQ ID NO: 533 - RNA, 12 nt, Artificial Sequence
  Description of Artificial Sequence: Synthetic oligonucleotide
uuagaaauacgg

SEQ ID NO: 534 - RNA, 12 nt, Artificial Sequence
  Description of Artificial Sequence: Synthetic oligonucleotide
aacauggguaca

SEQ ID NO: 535 - RNA, 14 nt, Artificial Sequence
  Description of Artificial Sequence: Synthetic oligonucleotide
aaagacacagaaga

SEQ ID NO: 536 - RNA, 11 nt, Artificial Sequence
  Description of Artificial Sequence: Synthetic oligonucleotide
uaguagggagg

SEQ ID NO: 537 - RNA, 12 nt, Artificial Sequence
  Description of Artificial Sequence: Synthetic oligonucleotide
gccuucugcagc

SEQ ID NO: 538 - RNA, 10 nt, Artificial Sequence
  Description of Artificial Sequence: Synthetic oligonucleotide
ggucugguac

SEQ ID NO: 539 - RNA, 12 nt, Artificial Sequence
  Description of Artificial Sequence: Synthetic oligonucleotide
cuaguccuuccg

SEQ ID NO: 540 - RNA, 12 nt, Artificial Sequence
  Description of Artificial Sequence: Synthetic oligonucleotide
ccagugaauauu

SEQ ID NO: 541 - RNA, 13 nt, Artificial Sequence
  Description of Artificial Sequence: Synthetic oligonucleotide
augaauucaaguu

SEQ ID NO: 542 - RNA, 12 nt, Artificial Sequence
  Description of Artificial Sequence: Synthetic oligonucleotide
caggacacagau

SEQ ID NO: 543 - RNA, 12 nt, Artificial Sequence
  Description of Artificial Sequence: Synthetic oligonucleotide
cucaaagcacag

SEQ ID NO: 544 - RNA, 10 nt, Artificial Sequence
  Description of Artificial Sequence: Synthetic oligonucleotide
accacugcca

SEQ ID NO: 545 - RNA, 13 nt, Artificial Sequence
  Description of Artificial Sequence: Synthetic oligonucleotide
gaaacuacuagug

SEQ ID NO: 546 - RNA, 12 nt, Artificial Sequence
  Description of Artificial Sequence: Synthetic oligonucleotide
aagucggacagc

SEQ ID NO: 547 - RNA, 13 nt, Artificial Sequence
  Description of Artificial Sequence: Synthetic oligonucleotide
gaaagcgaaaaau

SEQ ID NO: 548 - RNA, 13 nt, Artificial Sequence
  Description of Artificial Sequence: Synthetic oligonucleotide
cccucugauuuag

SEQ ID NO: 549 - RNA, 12 nt, Artificial Sequence
  Description of Artificial Sequence: Synthetic oligonucleotide
ugagcuauuuaa

SEQ ID NO: 550 - RNA, 13 nt, Artificial Sequence
  Description of Artificial Sequence: Synthetic oligonucleotide
aaaaggugaaaaa

SEQ ID NO: 551 - RNA, 14 nt, Artificial Sequence
  Description of Artificial Sequence: Synthetic oligonucleotide
gaaaaagcacuauu

SEQ ID NO: 552 - RNA, 12 nt, Artificial Sequence
  Description of Artificial Sequence: Synthetic oligonucleotide
ggcugaaaagaa

SEQ ID NO: 553 - RNA, 12 nt, Artificial Sequence
  Description of Artificial Sequence: Synthetic oligonucleotide
uaaacccuuaua

SEQ ID NO: 554 - RNA, 13 nt, Artificial Sequence
  Description of Artificial Sequence: Synthetic oligonucleotide
cauacuauuagcc

SEQ ID NO: 555 - RNA, 12 nt, Artificial Sequence
  Description of Artificial Sequence: Synthetic oligonucleotide
gacagaagcauu

SEQ ID NO: 556 - RNA, 14 nt, Artificial Sequence
  Description of Artificial Sequence: Synthetic oligonucleotide
agagcaaauaagau

SEQ ID NO: 557 - RNA, 14 nt, Artificial Sequence
  Description of Artificial Sequence: Synthetic oligonucleotide
ccaacauuuuucuc

SEQ ID NO: 558 - RNA, 15 nt, Artificial Sequence
  Description of Artificial Sequence: Synthetic oligonucleotide
uuaaguaugagaaaa

SEQ ID NO: 559 - RNA, 14 nt, Artificial Sequence
  Description of Artificial Sequence: Synthetic oligonucleotide
caggaauaaagaug

SEQ ID NO: 560 - RNA, 13 nt, Artificial Sequence
  Description of Artificial Sequence: Synthetic oligonucleotide
aauuugaaugacc

SEQ ID NO: 561 - RNA, 14 nt, Artificial Sequence
  Description of Artificial Sequence: Synthetic oligonucleotide
auguauaaagauag

SEQ ID NO: 562 - RNA, 12 nt, Artificial Sequence
  Description of Artificial Sequence: Synthetic oligonucleotide
ggcuguaacuau

SEQ ID NO: 563 - RNA, 11 nt, Artificial Sequence
  Description of Artificial Sequence: Synthetic oligonucleotide
ucugugaagug

SEQ ID NO: 564 - RNA, 14 nt, Artificial Sequence
  Description of Artificial Sequence: Synthetic oligonucleotide
ccuuuaaggaaaug

SEQ ID NO: 565 - RNA, 13 nt, Artificial Sequence
  Description of Artificial Sequence: Synthetic oligonucleotide
aaggauacaaaaa

SEQ ID NO: 566 - RNA, 12 nt, Artificial Sequence
  Description of Artificial Sequence: Synthetic oligonucleotide
agaugcaauuug

SEQ ID NO: 567 - RNA, 12 nt, Artificial Sequence
  Description of Artificial Sequence: Synthetic oligonucleotide
guucaaaacgaa

SEQ ID NO: 568 - RNA, 11 nt, Artificial Sequence
  Description of Artificial Sequence: Synthetic oligonucleotide
gugaaaccuca

SEQ ID NO: 569 - RNA, 13 nt, Artificial Sequence
  Description of Artificial Sequence: Synthetic oligonucleotide
acgaaagagaagc

SEQ ID NO: 570 - RNA, 12 nt, Artificial Sequence
  Description of Artificial Sequence: Synthetic oligonucleotide
cuccacaagcgc

SEQ ID NO: 571 - RNA, 14 nt, Artificial Sequence
  Description of Artificial Sequence: Synthetic oligonucleotide
gagaagauuccaaa

SEQ ID NO: 572 - RNA, 13 nt, Artificial Sequence
  Description of Artificial Sequence: Synthetic oligonucleotide
aaucuggauucaa

SEQ ID NO: 573 - RNA, 13 nt, Artificial Sequence
  Description of Artificial Sequence: Synthetic oligonucleotide
agaacagauuuga

SEQ ID NO: 574 - RNA, 11 nt, Artificial Sequence
  Description of Artificial Sequence: Synthetic oligonucleotide
ccagagcugug

SEQ ID NO: 575 - RNA, 12 nt, Artificial Sequence
  Description of Artificial Sequence: Synthetic oligonucleotide
ccucagauuguu

SEQ ID NO: 576 - RNA, 12 nt, Artificial Sequence
  Description of Artificial Sequence: Synthetic oligonucleotide
cuauuuuaauua

SEQ ID NO: 577 - RNA, 13 nt, Artificial Sequence
  Description of Artificial Sequence: Synthetic oligonucleotide
uuuaauuuauuaa

SEQ ID NO: 578 - RNA, 12 nt, Artificial Sequence
  Description of Artificial Sequence: Synthetic oligonucleotide
augcaguuugaa

SEQ ID NO: 579 - RNA, 11 nt, Artificial Sequence
  Description of Artificial Sequence: Synthetic oligonucleotide
caugcugcugg

SEQ ID NO: 580 - RNA, 13 nt, Artificial Sequence
  Description of Artificial Sequence: Synthetic oligonucleotide
agaugugcauuuc

SEQ ID NO: 581 - RNA, 12 nt, Artificial Sequence
  Description of Artificial Sequence: Synthetic oligonucleotide
ucaaaaccugug

SEQ ID NO: 582 - RNA, 11 nt, Artificial Sequence
  Description of Artificial Sequence: Synthetic oligonucleotide
gaaugugggua

SEQ ID NO: 583 - RNA, 10 nt, Artificial Sequence
  Description of Artificial Sequence: Synthetic oligonucleotide
auguggguag

SEQ ID NO: 584 - RNA, 13 nt, Artificial Sequence
  Description of Artificial Sequence: Synthetic oligonucleotide
ugaaaaugagcau

SEQ ID NO: 585 - RNA, 13 nt, Artificial Sequence
  Description of Artificial Sequence: Synthetic oligonucleotide
uugcuuuucaugu

SEQ ID NO: 586 - RNA, 12 nt, Artificial Sequence
  Description of Artificial Sequence: Synthetic oligonucleotide
uguauuucuaua

SEQ ID NO: 587 - RNA, 13 nt, Artificial Sequence
  Description of Artificial Sequence: Synthetic oligonucleotide
uuugauuaauguu

SEQ ID NO: 588 - RNA, 12 nt, Artificial Sequence
  Description of Artificial Sequence: Synthetic oligonucleotide
caacguguauag

SEQ ID NO: 589 - RNA, 12 nt, Artificial Sequence
  Description of Artificial Sequence: Synthetic oligonucleotide
cauauccuuggc

SEQ ID NO: 590 - RNA, 13 nt, Artificial Sequence
  Description of Artificial Sequence: Synthetic oligonucleotide
uacuaacaucugg

SEQ ID NO: 591 - RNA, 11 nt, Artificial Sequence
  Description of Artificial Sequence: Synthetic oligonucleotide
cauaaguugug

SEQ ID NO: 592 - RNA, 12 nt, Artificial Sequence
  Description of Artificial Sequence: Synthetic oligonucleotide
gcaucauuuugg

SEQ ID NO: 593 - RNA, 10 nt, Artificial Sequence
  Description of Artificial Sequence: Synthetic oligonucleotide
gcucuucuua

SEQ ID NO: 594 - RNA, 10 nt, Artificial Sequence
  Description of Artificial Sequence: Synthetic oligonucleotide
agauuagguc

SEQ ID NO: 595 - RNA, 12 nt, Artificial Sequence
  Description of Artificial Sequence: Synthetic oligonucleotide
auggaauugaaa

SEQ ID NO: 596 - RNA, 13 nt, Artificial Sequence
  Description of Artificial Sequence: Synthetic oligonucleotide
cacacucauuccu

SEQ ID NO: 597 - RNA, 12 nt, Artificial Sequence
  Description of Artificial Sequence: Synthetic oligonucleotide
uguagagguaac

SEQ ID NO: 598 - RNA, 11 nt, Artificial Sequence
  Description of Artificial Sequence: Synthetic oligonucleotide
caaccacaugc

SEQ ID NO: 599 - RNA, 12 nt, Artificial Sequence
  Description of Artificial Sequence: Synthetic oligonucleotide
ucggaaacaagu

SEQ ID NO: 600 - RNA, 11 nt, Artificial Sequence
  Description of Artificial Sequence: Synthetic oligonucleotide
acucccaauaa

SEQ ID NO: 601 - RNA, 13 nt, Artificial Sequence
  Description of Artificial Sequence: Synthetic oligonucleotide
aaugcuaagaaau

SEQ ID NO: 602 - RNA, 11 nt, Artificial Sequence
  Description of Artificial Sequence: Synthetic oligonucleotide
gucuuucucua

SEQ ID NO: 603 - RNA, 11 nt, Artificial Sequence
  Description of Artificial Sequence: Synthetic oligonucleotide
ugaauuucagg

SEQ ID NO: 604 - RNA, 13 nt, Artificial Sequence
  Description of Artificial Sequence: Synthetic oligonucleotide
cgauucccucuca

SEQ ID NO: 605 - RNA, 11 nt, Artificial Sequence
  Description of Artificial Sequence: Synthetic oligonucleotide
aggaaagugaa

SEQ ID NO: 606 - RNA, 12 nt, Artificial Sequence
  Description of Artificial Sequence: Synthetic oligonucleotide
gaggcugcaugc

SEQ ID NO: 607 - RNA, 11 nt, Artificial Sequence
  Description of Artificial Sequence: Synthetic oligonucleotide
ucucugaacag

SEQ ID NO: 608 - RNA, 12 nt, Artificial Sequence
  Description of Artificial Sequence: Synthetic oligonucleotide
aacuuggcugua

SEQ ID NO: 609 - RNA, 12 nt, Artificial Sequence
  Description of Artificial Sequence: Synthetic oligonucleotide
agaagccaaaau

SEQ ID NO: 610 - RNA, 14 nt, Artificial Sequence
  Description of Artificial Sequence: Synthetic oligonucleotide
auuaaaagaagucc

SEQ ID NO: 611 - RNA, 14 nt, Artificial Sequence
  Description of Artificial Sequence: Synthetic oligonucleotide
gaauccggauuauc

SEQ ID NO: 612 - RNA, 12 nt, Artificial Sequence
  Description of Artificial Sequence: Synthetic oligonucleotide
aaugugacauca

SEQ ID NO: 613 - RNA, 13 nt, Artificial Sequence
  Description of Artificial Sequence: Synthetic oligonucleotide
caucaaagcaagu

SEQ ID NO: 614 - RNA, 11 nt, Artificial Sequence
  Description of Artificial Sequence: Synthetic oligonucleotide
agagagagaaa

SEQ ID NO: 615 - RNA, 13 nt, Artificial Sequence
  Description of Artificial Sequence: Synthetic oligonucleotide
ucgcuguaguauu

SEQ ID NO: 616 - RNA, 14 nt, Artificial Sequence
  Description of Artificial Sequence: Synthetic oligonucleotide
cgcuguaguauuua

SEQ ID NO: 617 - RNA, 13 nt, Artificial Sequence
  Description of Artificial Sequence: Synthetic oligonucleotide
auuuaagcccaua

SEQ ID NO: 618 - RNA, 15 nt, Artificial Sequence
  Description of Artificial Sequence: Synthetic oligonucleotide
auuaaaauaaacaug

SEQ ID NO: 619 - RNA, 12 nt, Artificial Sequence
  Description of Artificial Sequence: Synthetic oligonucleotide
cuguucugaucg

SEQ ID NO: 620 - RNA, 16 nt, Artificial Sequence
  Description of Artificial Sequence: Synthetic oligonucleotide
aaauaauuugaacuuu

SEQ ID NO: 621 - RNA, 12 nt, Artificial Sequence
  Description of Artificial Sequence: Synthetic oligonucleotide
ugcgaccuuaau

SEQ ID NO: 622 - RNA, 11 nt, Artificial Sequence
  Description of Artificial Sequence: Synthetic oligonucleotide
cugagaaagcu

SEQ ID NO: 623 - RNA, 13 nt, Artificial Sequence
  Description of Artificial Sequence: Synthetic oligonucleotide
aguaaagaugcua

SEQ ID NO: 624 - RNA, 12 nt, Artificial Sequence
  Description of Artificial Sequence: Synthetic oligonucleotide
cugcuuaauugc

SEQ ID NO: 625 - RNA, 14 nt, Artificial Sequence
  Description of Artificial Sequence: Synthetic oligonucleotide
uaccauaugaauga

SEQ ID NO: 626 - RNA, 12 nt, Artificial Sequence
  Description of Artificial Sequence: Synthetic oligonucleotide
aacuuucuuauc

SEQ ID NO: 627 - RNA, 13 nt, Artificial Sequence
  Description of Artificial Sequence: Synthetic oligonucleotide
ccuugcaugacau

SEQ ID NO: 628 - RNA, 14 nt, Artificial Sequence
  Description of Artificial Sequence: Synthetic oligonucleotide
ugaauuuguauaug

SEQ ID NO: 629 - RNA, 12 nt, Artificial Sequence
  Description of Artificial Sequence: Synthetic oligonucleotide
gaauccuaguag

SEQ ID NO: 630 - RNA, 10 nt, Artificial Sequence
  Description of Artificial Sequence: Synthetic oligonucleotide
gaaagggaag

SEQ ID NO: 631 - RNA, 11 nt, Artificial Sequence
  Description of Artificial Sequence: Synthetic oligonucleotide
uaucggcaugc

SEQ ID NO: 632 - RNA, 12 nt, Artificial Sequence
  Description of Artificial Sequence: Synthetic oligonucleotide
caccucauagua

SEQ ID NO: 633 - RNA, 11 nt, Artificial Sequence
  Description of Artificial Sequence: Synthetic oligonucleotide
ccagaauugcc

SEQ ID NO: 634 - RNA, 11 nt, Artificial Sequence
  Description of Artificial Sequence: Synthetic oligonucleotide
uggugaucugg

SEQ ID NO: 635 - RNA, 12 nt, Artificial Sequence
  Description of Artificial Sequence: Synthetic oligonucleotide
gaucuggguaau

SEQ ID NO: 636 - RNA, 12 nt, Artificial Sequence
  Description of Artificial Sequence: Synthetic oligonucleotide
ggaugugaugaa

SEQ ID NO: 637 - RNA, 12 nt, Artificial Sequence
  Description of Artificial Sequence: Synthetic oligonucleotide
cauuuccacagc

SEQ ID NO: 638 - RNA, 11 nt, Artificial Sequence
  Description of Artificial Sequence: Synthetic oligonucleotide
acagcuacacc

SEQ ID NO: 639 - RNA, 12 nt, Artificial Sequence
  Description of Artificial Sequence: Synthetic oligonucleotide
ugcaguucuuac

SEQ ID NO: 640 - RNA, 12 nt, Artificial Sequence
  Description of Artificial Sequence: Synthetic oligonucleotide
acgagaagaaga

SEQ ID NO: 641 - RNA, 12 nt, Artificial Sequence
  Description of Artificial Sequence: Synthetic oligonucleotide
cgagaagaagau

SEQ ID NO: 642 - RNA, 15 nt, Artificial Sequence
  Description of Artificial Sequence: Synthetic oligonucleotide
aagaagaucauuuac

SEQ ID NO: 643 - RNA, 11 nt, Artificial Sequence
  Description of Artificial Sequence: Synthetic oligonucleotide
agaggaagagg

SEQ ID NO: 644 - RNA, 12 nt, Artificial Sequence
  Description of Artificial Sequence: Synthetic oligonucleotide
gaggaagaggug

SEQ ID NO: 645 - RNA, 13 nt, Artificial Sequence
  Description of Artificial Sequence: Synthetic oligonucleotide
cuacuuugagggc

SEQ ID NO: 646 - RNA, 12 nt, Artificial Sequence
  Description of Artificial Sequence: Synthetic oligonucleotide
agggcaucuccu

SEQ ID NO: 647 - RNA, 10 nt, Artificial Sequence
  Description of Artificial Sequence: Synthetic oligonucleotide
ggagugauau

SEQ ID NO: 648 - RNA, 11 nt, Artificial Sequence
  Description of Artificial Sequence: Synthetic oligonucleotide
gagugauaugg

SEQ ID NO: 649 - RNA, 12 nt, Artificial Sequence
  Description of Artificial Sequence: Synthetic oligonucleotide
ugcaguaaagau

SEQ ID NO: 650 - RNA, 13 nt, Artificial Sequence
  Description of Artificial Sequence: Synthetic oligonucleotide
aguaaagauccua

SEQ ID NO: 651 - RNA, 12 nt, Artificial Sequence
  Description of Artificial Sequence: Synthetic oligonucleotide
ugacaaaggaca

SEQ ID NO: 652 - RNA, 13 nt, Artificial Sequence
  Description of Artificial Sequence: Synthetic oligonucleotide
gcaauugugaccc

SEQ ID NO: 653 - RNA, 12 nt, Artificial Sequence
  Description of Artificial Sequence: Synthetic oligonucleotide
aacaucauccau

SEQ ID NO: 654 - RNA, 12 nt, Artificial Sequence
  Description of Artificial Sequence: Synthetic oligonucleotide
ugaaauccaaca

SEQ ID NO: 655 - RNA, 15 nt, Artificial Sequence
  Description of Artificial Sequence: Synthetic oligonucleotide
aacaauauauuucuc

SEQ ID NO: 656 - RNA, 14 nt, Artificial Sequence
  Description of Artificial Sequence: Synthetic oligonucleotide
aacaguaaagucac

SEQ ID NO: 657 - RNA, 14 nt, Artificial Sequence
  Description of Artificial Sequence: Synthetic oligonucleotide
ugugaagaaaguaa

SEQ ID NO: 658 - RNA, 13 nt, Artificial Sequence
  Description of Artificial Sequence: Synthetic oligonucleotide
cuuccgagccauc

SEQ ID NO: 659 - RNA, 12 nt, Artificial Sequence
  Description of Artificial Sequence: Synthetic oligonucleotide
aauggagguuga

SEQ ID NO: 660 - RNA, 12 nt, Artificial Sequence
  Description of Artificial Sequence: Synthetic oligonucleotide
ggagguugaaua

SEQ ID NO: 661 - RNA, 13 nt, Artificial Sequence
  Description of Artificial Sequence: Synthetic oligonucleotide
auuuugaguuuuc

SEQ ID NO: 662 - RNA, 12 nt, Artificial Sequence
  Description of Artificial Sequence: Synthetic oligonucleotide
uauccuguuugu

SEQ ID NO: 663 - RNA, 11 nt, Artificial Sequence
  Description of Artificial Sequence: Synthetic oligonucleotide
ccuguuuguuc

SEQ ID NO: 664 - RNA, 10 nt, Artificial Sequence
  Description of Artificial Sequence: Synthetic oligonucleotide
cucuacagcc

SEQ ID NO: 665 - RNA, 12 nt, Artificial Sequence
  Description of Artificial Sequence: Synthetic oligonucleotide
ucuuccauagcu

SEQ ID NO: 666 - RNA, 12 nt, Artificial Sequence
  Description of Artificial Sequence: Synthetic oligonucleotide
auaaucuuccug

SEQ ID NO: 667 - RNA, 12 nt, Artificial Sequence
  Description of Artificial Sequence: Synthetic oligonucleotide
uaaucuuccugu

SEQ ID NO: 668 - RNA, 12 nt, Artificial Sequence
  Description of Artificial Sequence: Synthetic oligonucleotide
cuucaugacuug

SEQ ID NO: 669 - RNA, 12 nt, Artificial Sequence
  Description of Artificial Sequence: Synthetic oligonucleotide
aagagggagaga

SEQ ID NO: 670 - RNA, 12 nt, Artificial Sequence
  Description of Artificial Sequence: Synthetic oligonucleotide
cgucuccuacca

SEQ ID NO: 671 - RNA, 12 nt, Artificial Sequence
  Description of Artificial Sequence: Synthetic oligonucleotide
gaucaaucggcc

SEQ ID NO: 672 - RNA, 12 nt, Artificial Sequence
  Description of Artificial Sequence: Synthetic oligonucleotide
ggacgaacaucc

SEQ ID NO: 673 - RNA, 11 nt, Artificial Sequence
  Description of Artificial Sequence: Synthetic oligonucleotide
agggucggaac

SEQ ID NO: 674 - RNA, 10 nt, Artificial Sequence
  Description of Artificial Sequence: Synthetic oligonucleotide
ucggaaccca

SEQ ID NO: 675 - RNA, 11 nt, Artificial Sequence
  Description of Artificial Sequence: Synthetic oligonucleotide
acccaagcuua

SEQ ID NO: 676 - RNA, 14 nt, Artificial Sequence
  Description of Artificial Sequence: Synthetic oligonucleotide
gaacuuuaagcaac

SEQ ID NO: 677 - RNA, 11 nt, Artificial Sequence
  Description of Artificial Sequence: Synthetic oligonucleotide
acuauucagug

SEQ ID NO: 678 - RNA, 11 nt, Artificial Sequence
  Description of Artificial Sequence: Synthetic oligonucleotide
cuauucagugg

SEQ ID NO: 679 - RNA, 13 nt, Artificial Sequence
  Description of Artificial Sequence: Synthetic oligonucleotide
aaacacagauaac

SEQ ID NO: 680 - RNA, 12 nt, Artificial Sequence
  Description of Artificial Sequence: Synthetic oligonucleotide
cuuaagaaaaga

SEQ ID NO: 681 - RNA, 12 nt, Artificial Sequence
  Description of Artificial Sequence: Synthetic oligonucleotide
cugaaggagugu

SEQ ID NO: 682 - RNA, 10 nt, Artificial Sequence
  Description of Artificial Sequence: Synthetic oligonucleotide
ucaccgcggg

SEQ ID NO: 683 - RNA, 14 nt, Artificial Sequence
  Description of Artificial Sequence: Synthetic oligonucleotide
agcagaaauaagcg

SEQ ID NO: 684 - RNA, 12 nt, Artificial Sequence
  Description of Artificial Sequence: Synthetic oligonucleotide
aagcgugccguu

SEQ ID NO: 685 - RNA, 12 nt, Artificial Sequence
  Description of Artificial Sequence: Synthetic oligonucleotide
agaaacagucac

SEQ ID NO: 686 - RNA, 12 nt, Artificial Sequence
  Description of Artificial Sequence: Synthetic oligonucleotide
agaggaagaagg

SEQ ID NO: 687 - RNA, 14 nt, Artificial Sequence
  Description of Artificial Sequence: Synthetic oligonucleotide
uguauucaaaauau

SEQ ID NO: 688 - RNA, 13 nt, Artificial Sequence
  Description of Artificial Sequence: Synthetic oligonucleotide
auuuuccucccuu

SEQ ID NO: 689 - RNA, 13 nt, Artificial Sequence
  Description of Artificial Sequence: Synthetic oligonucleotide
caaagaaagauag

SEQ ID NO: 690 - RNA, 12 nt, Artificial Sequence
  Description of Artificial Sequence: Synthetic oligonucleotide
aagaaagauaga

SEQ ID NO: 691 - RNA, 13 nt, Artificial Sequence
  Description of Artificial Sequence: Synthetic oligonucleotide
gaaagcauuuguu

SEQ ID NO: 692 - RNA, 13 nt, Artificial Sequence
  Description of Artificial Sequence: Synthetic oligonucleotide
ugaguuaaacgaa

SEQ ID NO: 693 - RNA, 12 nt, Artificial Sequence
  Description of Artificial Sequence: Synthetic oligonucleotide
acugauacagaa

SEQ ID NO: 694 - RNA, 12 nt, Artificial Sequence
  Description of Artificial Sequence: Synthetic oligonucleotide
auauuauauaua

SEQ ID NO: 695 - RNA, 12 nt, Artificial Sequence
  Description of Artificial Sequence: Synthetic oligonucleotide
auuauauauaua

SEQ ID NO: 696 - RNA, 12 nt, Artificial Sequence
  Description of Artificial Sequence: Synthetic oligonucleotide
ucacuggaugua

SEQ ID NO: 697 - RNA, 12 nt, Artificial Sequence
  Description of Artificial Sequence: Synthetic oligonucleotide
cagggaagagga

SEQ ID NO: 698 - RNA, 15 nt, Artificial Sequence
  Description of Artificial Sequence: Synthetic oligonucleotide
augaucuuuuuuuug

SEQ ID NO: 699 - RNA, 11 nt, Artificial Sequence
  Description of Artificial Sequence: Synthetic oligonucleotide
aguucacggcc

SEQ ID NO: 700 - RNA, 13 nt, Artificial Sequence
  Description of Artificial Sequence: Synthetic oligonucleotide
caccaucacacca

SEQ ID NO: 701 - RNA, 11 nt, Artificial Sequence
  Description of Artificial Sequence: Synthetic oligonucleotide
ccugcggguuu

SEQ ID NO: 702 - RNA, 10 nt, Artificial Sequence
  Description of Artificial Sequence: Synthetic oligonucleotide
auccaguuug

SEQ ID NO: 703 - RNA, 13 nt, Artificial Sequence
  Description of Artificial Sequence: Synthetic oligonucleotide
guuaaggacuucu

SEQ ID NO: 704 - RNA, 13 nt, Artificial Sequence
  Description of Artificial Sequence: Synthetic oligonucleotide
cagugggacagag

SEQ ID NO: 705 - RNA, 14 nt, Artificial Sequence
  Description of Artificial Sequence: Synthetic oligonucleotide
aauuuguuauugug

SEQ ID NO: 706 - RNA, 13 nt, Artificial Sequence
  Description of Artificial Sequence: Synthetic oligonucleotide
uucaaaugcauuu

SEQ ID NO: 707 - RNA, 10 nt, Artificial Sequence
  Description of Artificial Sequence: Synthetic oligonucleotide
caggaaagcc

SEQ ID NO: 708 - RNA, 11 nt, Artificial Sequence
  Description of Artificial Sequence: Synthetic oligonucleotide
aggaaagcccu

SEQ ID NO: 709 - RNA, 12 nt, Artificial Sequence
  Description of Artificial Sequence: Synthetic oligonucleotide
cccagcauggcc

SEQ ID NO: 710 - RNA, 11 nt, Artificial Sequence
  Description of Artificial Sequence: Synthetic oligonucleotide
cuucucccuga

SEQ ID NO: 711 - RNA, 12 nt, Artificial Sequence
  Description of Artificial Sequence: Synthetic oligonucleotide
gaagaagcccuu

SEQ ID NO: 712 - RNA, 12 nt, Artificial Sequence
  Description of Artificial Sequence: Synthetic oligonucleotide
agaagcccuuca

SEQ ID NO: 713 - RNA, 11 nt, Artificial Sequence
  Description of Artificial Sequence: Synthetic oligonucleotide
gcccuucagcg

SEQ ID NO: 714 - RNA, 11 nt, Artificial Sequence
  Description of Artificial Sequence: Synthetic oligonucleotide
ccuucagcggc

SEQ ID NO: 715 - RNA, 12 nt, Artificial Sequence
  Description of Artificial Sequence: Synthetic oligonucleotide
ucagcggccagu

SEQ ID NO: 716 - RNA, 12 nt, Artificial Sequence
  Description of Artificial Sequence: Synthetic oligonucleotide
ugaaaagcuccg

SEQ ID NO: 717 - RNA, 11 nt, Artificial Sequence
  Description of Artificial Sequence: Synthetic oligonucleotide
aaaagcuccgg

SEQ ID NO: 718 - RNA, 13 nt, Artificial Sequence
  Description of Artificial Sequence: Synthetic oligonucleotide
agucaacagucug

SEQ ID NO: 719 - RNA, 13 nt, Artificial Sequence
  Description of Artificial Sequence: Synthetic oligonucleotide
cagaguucaaaag

SEQ ID NO: 720 - RNA, 13 nt, Artificial Sequence
  Description of Artificial Sequence: Synthetic oligonucleotide
agaguucaaaagc

SEQ ID NO: 721 - RNA, 12 nt, Artificial Sequence
  Description of Artificial Sequence: Synthetic oligonucleotide
uucaaaagcccu

SEQ ID NO: 722 - RNA, 12 nt, Artificial Sequence
  Description of Artificial Sequence: Synthetic oligonucleotide
ucaaaagcccuu

SEQ ID NO: 723 - RNA, 12 nt, Artificial Sequence
  Description of Artificial Sequence: Synthetic oligonucleotide
aaaagcccuuca

SEQ ID NO: 724 - RNA, 12 nt, Artificial Sequence
  Description of Artificial Sequence: Synthetic oligonucleotide
aaagcccuucag

SEQ ID NO: 725 - RNA, 13 nt, Artificial Sequence
  Description of Artificial Sequence: Synthetic oligonucleotide
gugaagccgcucg

SEQ ID NO: 726 - RNA, 12 nt, Artificial Sequence
  Description of Artificial Sequence: Synthetic oligonucleotide
cacgccagucaa

SEQ ID NO: 727 - RNA, 13 nt, Artificial Sequence
  Description of Artificial Sequence: Synthetic oligonucleotide
uucuuggugcgug

SEQ ID NO: 728 - RNA, 14 nt, Artificial Sequence
  Description of Artificial Sequence: Synthetic oligonucleotide
auuggauucaucag

SEQ ID NO: 729 - RNA, 13 nt, Artificial Sequence
  Description of Artificial Sequence: Synthetic oligonucleotide
uggaauaccuaag

SEQ ID NO: 730 - RNA, 12 nt, Artificial Sequence
  Description of Artificial Sequence: Synthetic oligonucleotide
auuugaggcuca

SEQ ID NO: 731 - RNA, 11 nt, Artificial Sequence
  Description of Artificial Sequence: Synthetic oligonucleotide
ucuacaauugg

SEQ ID NO: 732 - RNA, 12 nt, Artificial Sequence
  Description of Artificial Sequence: Synthetic oligonucleotide
uaguuaggagcc

SEQ ID NO: 733 - RNA, 13 nt, Artificial Sequence
  Description of Artificial Sequence: Synthetic oligonucleotide
agucaauauccac

SEQ ID NO: 734 - RNA, 13 nt, Artificial Sequence
  Description of Artificial Sequence: Synthetic oligonucleotide
auguucagucaca

SEQ ID NO: 735 - RNA, 12 nt, Artificial Sequence
  Description of Artificial Sequence: Synthetic oligonucleotide
acacacacauac

SEQ ID NO: 736 - RNA, 12 nt, Artificial Sequence
  Description of Artificial Sequence: Synthetic oligonucleotide
uuccuuuugcuu

SEQ ID NO: 737 - RNA, 16 nt, Artificial Sequence
  Description of Artificial Sequence: Synthetic oligonucleotide
uuuuaaaguaauuuuu

SEQ ID NO: 738 - RNA, 13 nt, Artificial Sequence
  Description of Artificial Sequence: Synthetic oligonucleotide
caacagucaaugg

SEQ ID NO: 739 - RNA, 13 nt, Artificial Sequence
  Description of Artificial Sequence: Synthetic oligonucleotide
ucgacaaaccaau

SEQ ID NO: 740 - RNA, 12 nt, Artificial Sequence
  Description of Artificial Sequence: Synthetic oligonucleotide
acugcuaccacu

SEQ ID NO: 741 - RNA, 13 nt, Artificial Sequence
  Description of Artificial Sequence: Synthetic oligonucleotide
gcaagcggucuua

SEQ ID NO: 742 - RNA, 13 nt, Artificial Sequence
  Description of Artificial Sequence: Synthetic oligonucleotide
ggucuuaccggcu

SEQ ID NO: 743 - RNA, 11 nt, Artificial Sequence
  Description of Artificial Sequence: Synthetic oligonucleotide
gauggguuacc

SEQ ID NO: 744 - RNA, 11 nt, Artificial Sequence
  Description of Artificial Sequence: Synthetic oligonucleotide
guuaccugcga

SEQ ID NO: 745 - RNA, 12 nt, Artificial Sequence
  Description of Artificial Sequence: Synthetic oligonucleotide
aaucuugcugag

SEQ ID NO: 746 - RNA, 13 nt, Artificial Sequence
  Description of Artificial Sequence: Synthetic oligonucleotide
agcauaaaacagu

SEQ ID NO: 747 - RNA, 12 nt, Artificial Sequence
  Description of Artificial Sequence: Synthetic oligonucleotide
guccuuuauccu

SEQ ID NO: 748 - RNA, 12 nt, Artificial Sequence
  Description of Artificial Sequence: Synthetic oligonucleotide
caacgcaaguug

SEQ ID NO: 749 - RNA, 13 nt, Artificial Sequence
  Description of Artificial Sequence: Synthetic oligonucleotide
aaacugaaaccau

SEQ ID NO: 750 - RNA, 14 nt, Artificial Sequence
  Description of Artificial Sequence: Synthetic oligonucleotide
acuuuguuaaauau

SEQ ID NO: 751 - RNA, 14 nt, Artificial Sequence
  Description of Artificial Sequence: Synthetic oligonucleotide
guauauuaaaaguu

SEQ ID NO: 752 - RNA, 13 nt, Artificial Sequence
  Description of Artificial Sequence: Synthetic oligonucleotide
guuuugacuuaac

SEQ ID NO: 753 - RNA, 13 nt, Artificial Sequence
  Description of Artificial Sequence: Synthetic oligonucleotide
gcaaacucagcac

SEQ ID NO: 754 - RNA, 11 nt, Artificial Sequence
  Description of Artificial Sequence: Synthetic oligonucleotide
ugcugaccuca

SEQ ID NO: 755 - RNA, 14 nt, Artificial Sequence
  Description of Artificial Sequence: Synthetic oligonucleotide
uuuauucagaucgc

SEQ ID NO: 756 - RNA, 13 nt, Artificial Sequence
  Description of Artificial Sequence: Synthetic oligonucleotide
aggguucugggau

SEQ ID NO: 757 - RNA, 15 nt, Artificial Sequence
  Description of Artificial Sequence: Synthetic oligonucleotide
auauuggaaauuaug

SEQ ID NO: 758 - RNA, 13 nt, Artificial Sequence
  Description of Artificial Sequence: Synthetic oligonucleotide
auggaagcacuag

SEQ ID NO: 759 - RNA, 13 nt, Artificial Sequence
  Description of Artificial Sequence: Synthetic oligonucleotide
guuuuuaugugga

SEQ ID NO: 760 - RNA, 12 nt, Artificial Sequence
  Description of Artificial Sequence: Synthetic oligonucleotide
ggaauugguaga

SEQ ID NO: 761 - RNA, 13 nt, Artificial Sequence
  Description of Artificial Sequence: Synthetic oligonucleotide
uuagacuuggaga

SEQ ID NO: 762 - RNA, 13 nt, Artificial Sequence
  Description of Artificial Sequence: Synthetic oligonucleotide
uuacaguauucca

SEQ ID NO: 763 - RNA, 15 nt, Artificial Sequence
  Description of Artificial Sequence: Synthetic oligonucleotide
ccacugaugaauuaa

SEQ ID NO: 764 - RNA, 12 nt, Artificial Sequence
  Description of Artificial Sequence: Synthetic oligonucleotide
ccacaucaucac

SEQ ID NO: 765 - RNA, 13 nt, Artificial Sequence
  Description of Artificial Sequence: Synthetic oligonucleotide
cucaccaaacaga

SEQ ID NO: 766 - RNA, 12 nt, Artificial Sequence
  Description of Artificial Sequence: Synthetic oligonucleotide
ggaacaugaugg

SEQ ID NO: 767 - RNA, 12 nt, Artificial Sequence
  Description of Artificial Sequence: Synthetic oligonucleotide
cauguagacugc

SEQ ID NO: 768 - RNA, 13 nt, Artificial Sequence
  Description of Artificial Sequence: Synthetic oligonucleotide
ggaucuauuuaug

SEQ ID NO: 769 - RNA, 12 nt, Artificial Sequence
  Description of Artificial Sequence: Synthetic oligonucleotide
gcacuauuauca

SEQ ID NO: 770 - RNA, 11 nt, Artificial Sequence
  Description of Artificial Sequence: Synthetic oligonucleotide
aucaguucugc

SEQ ID NO: 771 - RNA, 13 nt, Artificial Sequence
  Description of Artificial Sequence: Synthetic oligonucleotide
agauuaaaccuac

SEQ ID NO: 772 - RNA, 13 nt, Artificial Sequence
  Description of Artificial Sequence: Synthetic oligonucleotide
auaaaauccuucu

SEQ ID NO: 773 - RNA, 12 nt, Artificial Sequence
  Description of Artificial Sequence: Synthetic oligonucleotide
aaugcuguagac

SEQ ID NO: 774 - RNA, 13 nt, Artificial Sequence
  Description of Artificial Sequence: Synthetic oligonucleotide
uugauaggaauag

SEQ ID NO: 775 - RNA, 11 nt, Artificial Sequence
  Description of Artificial Sequence: Synthetic oligonucleotide
aauggcccuga

SEQ ID NO: 776 - RNA, 11 nt, Artificial Sequence
  Description of Artificial Sequence: Synthetic oligonucleotide
uuccucaagca

SEQ ID NO: 777 - RNA, 10 nt, Artificial Sequence
  Description of Artificial Sequence: Synthetic oligonucleotide
guucagccca

SEQ ID NO: 778 - RNA, 11 nt, Artificial Sequence
  Description of Artificial Sequence: Synthetic oligonucleotide
gcugcugaacc

SEQ ID NO: 779 - RNA, 12 nt, Artificial Sequence
  Description of Artificial Sequence: Synthetic oligonucleotide
aaguucucuuca

SEQ ID NO: 780 - RNA, 11 nt, Artificial Sequence
  Description of Artificial Sequence: Synthetic oligonucleotide
ccagccuagag

SEQ ID NO: 781 - RNA, 13 nt, Artificial Sequence
  Description of Artificial Sequence: Synthetic oligonucleotide
cucugugaagugu

SEQ ID NO: 782 - RNA, 14 nt, Artificial Sequence
  Description of Artificial Sequence: Synthetic oligonucleotide
ugagaaaauuucaa

SEQ ID NO: 783 - RNA, 11 nt, Artificial Sequence
  Description of Artificial Sequence: Synthetic oligonucleotide
aauccuccuga

SEQ ID NO: 784 - RNA, 12 nt, Artificial Sequence
  Description of Artificial Sequence: Synthetic oligonucleotide
gugacaucauau

SEQ ID NO: 785 - RNA, 13 nt, Artificial Sequence
  Description of Artificial Sequence: Synthetic oligonucleotide
aaucuucaucaua

SEQ ID NO: 786 - RNA, 13 nt, Artificial Sequence
  Description of Artificial Sequence: Synthetic oligonucleotide
gacuagcuauuaa

SEQ ID NO: 787 - RNA, 14 nt, Artificial Sequence
  Description of Artificial Sequence: Synthetic oligonucleotide
ucucuacuaaaaau

SEQ ID NO: 788 - RNA, 12 nt, Artificial Sequence
  Description of Artificial Sequence: Synthetic oligonucleotide
ucuaucucgccu

SEQ ID NO: 789 - RNA, 13 nt, Artificial Sequence
  Description of Artificial Sequence: Synthetic oligonucleotide
cuucgguccaguu

SEQ ID NO: 790 - RNA, 11 nt, Artificial Sequence
  Description of Artificial Sequence: Synthetic oligonucleotide
gauguagccgc

SEQ ID NO: 791 - RNA, 12 nt, Artificial Sequence
  Description of Artificial Sequence: Synthetic oligonucleotide
ugaggagacuug

SEQ ID NO: 792 - RNA, 12 nt, Artificial Sequence
  Description of Artificial Sequence: Synthetic oligonucleotide
gaguagugagga

SEQ ID NO: 793 - RNA, 14 nt, Artificial Sequence
  Description of Artificial Sequence: Synthetic oligonucleotide
cagaugaguacaaa

SEQ ID NO: 794 - RNA, 13 nt, Artificial Sequence
  Description of Artificial Sequence: Synthetic oligonucleotide
guuguuaaugggc

SEQ ID NO: 795 - RNA, 13 nt, Artificial Sequence
  Description of Artificial Sequence: Synthetic oligonucleotide
uuuuuaauuuauu

SEQ ID NO: 796 - RNA, 12 nt, Artificial Sequence
  Description of Artificial Sequence: Synthetic oligonucleotide
uauuuaaauaug

SEQ ID NO: 797 - RNA, 13 nt, Artificial Sequence
  Description of Artificial Sequence: Synthetic oligonucleotide
uauccuuuguuuc

SEQ ID NO: 798 - RNA, 14 nt, Artificial Sequence
  Description of Artificial Sequence: Synthetic oligonucleotide
cgucuaaguguuug

SEQ ID NO: 799 - RNA, 12 nt, Artificial Sequence
  Description of Artificial Sequence: Synthetic oligonucleotide
accugugacaaa

SEQ ID NO: 800 - RNA, 13 nt, Artificial Sequence
  Description of Artificial Sequence: Synthetic oligonucleotide
ccaggcugaauua

SEQ ID NO: 801 - RNA, 14 nt, Artificial Sequence
  Description of Artificial Sequence: Synthetic oligonucleotide
gucauucuuacaau

SEQ ID NO: 802 - RNA, 15 nt, Artificial Sequence
  Description of Artificial Sequence: Synthetic oligonucleotide
ucauucuuacaauug

SEQ ID NO: 803 - RNA, 12 nt, Artificial Sequence
  Description of Artificial Sequence: Synthetic oligonucleotide
cagagaguguac

SEQ ID NO: 804 - RNA, 12 nt, Artificial Sequence
  Description of Artificial Sequence: Synthetic oligonucleotide
agaacucagcag

SEQ ID NO: 805 - RNA, 13 nt, Artificial Sequence
  Description of Artificial Sequence: Synthetic oligonucleotide
uuuauuuucagua

SEQ ID NO: 806 - RNA, 12 nt, Artificial Sequence
  Description of Artificial Sequence: Synthetic oligonucleotide
ucuuaaauggaa

SEQ ID NO: 807 - RNA, 13 nt, Artificial Sequence
  Description of Artificial Sequence: Synthetic oligonucleotide
ugccuaaaauugu

SEQ ID NO: 808 - RNA, 12 nt, Artificial Sequence
  Description of Artificial Sequence: Synthetic oligonucleotide
agacugugagcu

SEQ ID NO: 809 - RNA, 14 nt, Artificial Sequence
  Description of Artificial Sequence: Synthetic oligonucleotide
ugcuuuuuauuaau

SEQ ID NO: 810 - RNA, 13 nt, Artificial Sequence
  Description of Artificial Sequence: Synthetic oligonucleotide
cucuucuuacauu

SEQ ID NO: 811 - RNA, 15 nt, Artificial Sequence
  Description of Artificial Sequence: Synthetic oligonucleotide
cauuuguaaaaaugu

SEQ ID NO: 812 - RNA, 15 nt, Artificial Sequence
  Description of Artificial Sequence: Synthetic oligonucleotide
aucuuaauucauauu

SEQ ID NO: 813 - RNA, 13 nt, Artificial Sequence
  Description of Artificial Sequence: Synthetic oligonucleotide
gaacuaaucauga

SEQ ID NO: 814 - RNA, 12 nt, Artificial Sequence
  Description of Artificial Sequence: Synthetic oligonucleotide
ucugcucuuggg

SEQ ID NO: 815 - RNA, 13 nt, Artificial Sequence
  Description of Artificial Sequence: Synthetic oligonucleotide
caguagcuuugag

SEQ ID NO: 816 - RNA, 14 nt, Artificial Sequence
  Description of Artificial Sequence: Synthetic oligonucleotide
cacguaauauuuca

SEQ ID NO: 817 - RNA, 13 nt, Artificial Sequence
  Description of Artificial Sequence: Synthetic oligonucleotide
uauucucuucacu

SEQ ID NO: 818 - RNA, 14 nt, Artificial Sequence
  Description of Artificial Sequence: Synthetic oligonucleotide
cuaaugcuaagaaa

SEQ ID NO: 819 - RNA, 12 nt, Artificial Sequence
  Description of Artificial Sequence: Synthetic oligonucleotide
gcugaaaaucaa

SEQ ID NO: 820 - RNA, 14 nt, Artificial Sequence
  Description of Artificial Sequence: Synthetic oligonucleotide
aauaugauuacuuu

SEQ ID NO: 821 - RNA, 14 nt, Artificial Sequence
  Description of Artificial Sequence: Synthetic oligonucleotide
cauuuuguucuaca

SEQ ID NO: 822 - RNA, 12 nt, Artificial Sequence
  Description of Artificial Sequence: Synthetic oligonucleotide
cccgggacucuc

SEQ ID NO: 823 - RNA, 14 nt, Artificial Sequence
  Description of Artificial Sequence: Synthetic oligonucleotide
ccuuuaaaguaaag

SEQ ID NO: 824 - RNA, 13 nt, Artificial Sequence
  Description of Artificial Sequence: Synthetic oligonucleotide
ucuggaagccugg

SEQ ID NO: 825 - RNA, 14 nt, Artificial Sequence
  Description of Artificial Sequence: Synthetic oligonucleotide
aaaacaaaagagag

SEQ ID NO: 826 - RNA, 13 nt, Artificial Sequence
  Description of Artificial Sequence: Synthetic oligonucleotide
aucaguuaugccg

SEQ ID NO: 827 - RNA, 13 nt, Artificial Sequence
  Description of Artificial Sequence: Synthetic oligonucleotide
uaaaagaagucca

SEQ ID NO: 828 - RNA, 11 nt, Artificial Sequence
  Description of Artificial Sequence: Synthetic oligonucleotide
aggugagguua

SEQ ID NO: 829 - RNA, 11 nt, Artificial Sequence
  Description of Artificial Sequence: Synthetic oligonucleotide
gggaagaggac

SEQ ID NO: 830 - RNA, 13 nt, Artificial Sequence
  Description of Artificial Sequence: Synthetic oligonucleotide
aagcaaguauugu

SEQ ID NO: 831 - RNA, 12 nt, Artificial Sequence
  Description of Artificial Sequence: Synthetic oligonucleotide
auuguagcacuc

SEQ ID NO: 832 - RNA, 14 nt, Artificial Sequence
  Description of Artificial Sequence: Synthetic oligonucleotide
acaaaaccacaaau

SEQ ID NO: 833 - RNA, 12 nt, Artificial Sequence
  Description of Artificial Sequence: Synthetic oligonucleotide
uaagcccauaca

SEQ ID NO: 834 - RNA, 11 nt, Artificial Sequence
  Description of Artificial Sequence: Synthetic oligonucleotide
agcccauacag

SEQ ID NO: 835 - RNA, 12 nt, Artificial Sequence
  Description of Artificial Sequence: Synthetic oligonucleotide
cagaaaccuucc

SEQ ID NO: 836 - RNA, 10 nt, Artificial Sequence
  Description of Artificial Sequence: Synthetic oligonucleotide
guauaccuac

SEQ ID NO: 837 - RNA, 13 nt, Artificial Sequence
  Description of Artificial Sequence: Synthetic oligonucleotide
gccaguuuucgga

SEQ ID NO: 838 - RNA, 9 nt, Artificial Sequence
  Description of Artificial Sequence: Synthetic oligonucleotide
ggaacaggg

SEQ ID NO: 839 - RNA, 13 nt, Artificial Sequence
  Description of Artificial Sequence: Synthetic oligonucleotide
uuaacuuuccagu

SEQ ID NO: 840 - RNA, 14 nt, Artificial Sequence
  Description of Artificial Sequence: Synthetic oligonucleotide
aaaguuugguuuug

SEQ ID NO: 841 - RNA, 12 nt, Artificial Sequence
  Description of Artificial Sequence: Synthetic oligonucleotide
cuucccacugua

SEQ ID NO: 842 - RNA, 13 nt, Artificial Sequence
  Description of Artificial Sequence: Synthetic oligonucleotide
ugauaccauauga

SEQ ID NO: 843 - RNA, 11 nt, Artificial Sequence
  Description of Artificial Sequence: Synthetic oligonucleotide
aacaugggcug

SEQ ID NO: 844 - RNA, 13 nt, Artificial Sequence
  Description of Artificial Sequence: Synthetic oligonucleotide
caacuuuuucaua

SEQ ID NO: 845 - RNA, 12 nt, Artificial Sequence
  Description of Artificial Sequence: Synthetic oligonucleotide
caugaggccgga

SEQ ID NO: 846 - RNA, 11 nt, Artificial Sequence
  Description of Artificial Sequence: Synthetic oligonucleotide
acugcauuugu

SEQ ID NO: 847 - RNA, 13 nt, Artificial Sequence
  Description of Artificial Sequence: Synthetic oligonucleotide
aauguuuacuacc

SEQ ID NO: 848 - RNA, 15 nt, Artificial Sequence
  Description of Artificial Sequence: Synthetic oligonucleotide
aauuuuuugaugaaa

SEQ ID NO: 849 - RNA, 14 nt, Artificial Sequence
  Description of Artificial Sequence: Synthetic oligonucleotide
cagugugugaauuu

SEQ ID NO: 850 - RNA, 13 nt, Artificial Sequence
  Description of Artificial Sequence: Synthetic oligonucleotide
gagcaauguaugu

SEQ ID NO: 851 - RNA, 14 nt, Artificial Sequence
  Description of Artificial Sequence: Synthetic oligonucleotide
aaagcacauauaua

SEQ ID NO: 852 - RNA, 14 nt, Artificial Sequence
  Description of Artificial Sequence: Synthetic oligonucleotide
guaauaguuucucc

SEQ ID NO: 853 - RNA, 13 nt, Artificial Sequence
  Description of Artificial Sequence: Synthetic oligonucleotide
aguuucuccaaau

SEQ ID NO: 854 - RNA, 13 nt, Artificial Sequence
  Description of Artificial Sequence: Synthetic oligonucleotide
uacuuccuagaaa

SEQ ID NO: 855 - RNA, 13 nt, Artificial Sequence
  Description of Artificial Sequence: Synthetic oligonucleotide
uacaccauauaug

SEQ ID NO: 856 - RNA, 14 nt, Artificial Sequence
  Description of Artificial Sequence: Synthetic oligonucleotide
auauaugaauggag

SEQ ID NO: 857 - RNA, 13 nt, Artificial Sequence
  Description of Artificial Sequence: Synthetic oligonucleotide
acgagaagaagau

SEQ ID NO: 858 - RNA, 13 nt, Artificial Sequence
  Description of Artificial Sequence: Synthetic oligonucleotide
ucauuuacaggga

SEQ ID NO: 859 - RNA, 13 nt, Artificial Sequence
  Description of Artificial Sequence: Synthetic oligonucleotide
cauuuacagggac

SEQ ID NO: 860 - RNA, 10 nt, Artificial Sequence
  Description of Artificial Sequence: Synthetic oligonucleotide
agggaccuga

SEQ ID NO: 861 - RNA, 14 nt, Artificial Sequence
  Description of Artificial Sequence: Synthetic oligonucleotide
uguuugacugcauc

SEQ ID NO: 862 - RNA, 13 nt, Artificial Sequence
  Description of Artificial Sequence: Synthetic oligonucleotide
uuugacugcaucg

SEQ ID NO: 863 - RNA, 12 nt, Artificial Sequence
  Description of Artificial Sequence: Synthetic oligonucleotide
gaguucacaggg

SEQ ID NO: 864 - RNA, 13 nt, Artificial Sequence
  Description of Artificial Sequence: Synthetic oligonucleotide
ggcaccucugucc

SEQ ID NO: 865 - RNA, 15 nt, Artificial Sequence
  Description of Artificial Sequence: Synthetic oligonucleotide
gguuugucuuuuuaa

SEQ ID NO: 866 - RNA, 14 nt, Artificial Sequence
  Description of Artificial Sequence: Synthetic oligonucleotide
uuugucuuuuuaag

SEQ ID NO: 867 - RNA, 13 nt, Artificial Sequence
  Description of Artificial Sequence: Synthetic oligonucleotide
ccuaaagguuguc

SEQ ID NO: 868 - RNA, 12 nt, Artificial Sequence
  Description of Artificial Sequence: Synthetic oligonucleotide
aagguugucgac

SEQ ID NO: 869 - RNA, 13 nt, Artificial Sequence
  Description of Artificial Sequence: Synthetic oligonucleotide
accuggcaauugu

SEQ ID NO: 870 - RNA, 12 nt, Artificial Sequence
  Description of Artificial Sequence: Synthetic oligonucleotide
aguggugcgagg

SEQ ID NO: 871 - RNA, 13 nt, Artificial Sequence
  Description of Artificial Sequence: Synthetic oligonucleotide
agagacaugaaau

SEQ ID NO: 872 - RNA, 13 nt, Artificial Sequence
  Description of Artificial Sequence: Synthetic oligonucleotide
auauauuucucca

SEQ ID NO: 873 - RNA, 10 nt, Artificial Sequence
  Description of Artificial Sequence: Synthetic oligonucleotide
caugaaggcu

SEQ ID NO: 874 - RNA, 11 nt, Artificial Sequence
  Description of Artificial Sequence: Synthetic oligonucleotide
gcuggaguggu

SEQ ID NO: 875 - RNA, 11 nt, Artificial Sequence
  Description of Artificial Sequence: Synthetic oligonucleotide
aggaagagagg

SEQ ID NO: 876 - RNA, 12 nt, Artificial Sequence
  Description of Artificial Sequence: Synthetic oligonucleotide
cuugcaucgggc

SEQ ID NO: 877 - RNA, 13 nt, Artificial Sequence
  Description of Artificial Sequence: Synthetic oligonucleotide
auauccuacugug

SEQ ID NO: 878 - RNA, 13 nt, Artificial Sequence
  Description of Artificial Sequence: Synthetic oligonucleotide
uccuacuguguaa

SEQ ID NO: 879 - RNA, 12 nt, Artificial Sequence
  Description of Artificial Sequence: Synthetic oligonucleotide
ccuuguagugua

SEQ ID NO: 880 - RNA, 13 nt, Artificial Sequence
  Description of Artificial Sequence: Synthetic oligonucleotide
ucuuuguugauug

SEQ ID NO: 881 - RNA, 14 nt, Artificial Sequence
  Description of Artificial Sequence: Synthetic oligonucleotide
uuuguugauugaaa

SEQ ID NO: 882 - RNA, 15 nt, Artificial Sequence
  Description of Artificial Sequence: Synthetic oligonucleotide
uucuuuuucuuccau

SEQ ID NO: 883 - RNA, 13 nt, Artificial Sequence
  Description of Artificial Sequence: Synthetic oligonucleotide
aaucuuccuucua

SEQ ID NO: 884 - RNA, 13 nt, Artificial Sequence
  Description of Artificial Sequence: Synthetic oligonucleotide
uugaaugcuucau

SEQ ID NO: 885 - RNA, 13 nt, Artificial Sequence
  Description of Artificial Sequence: Synthetic oligonucleotide
ugaaugcuucaug

SEQ ID NO: 886 - RNA, 13 nt, Artificial Sequence
  Description of Artificial Sequence: Synthetic oligonucleotide
aauucuacuuuga

SEQ ID NO: 887 - RNA, 13 nt, Artificial Sequence
  Description of Artificial Sequence: Synthetic oligonucleotide
agcaacuacagac

SEQ ID NO: 888 - RNA, 13 nt, Artificial Sequence
  Description of Artificial Sequence: Synthetic oligonucleotide
gaccaaggucaac

SEQ ID NO: 889 - RNA, 13 nt, Artificial Sequence
  Description of Artificial Sequence: Synthetic oligonucleotide
cgacuaucucgac

SEQ ID NO: 890 - RNA, 13 nt, Artificial Sequence
  Description of Artificial Sequence: Synthetic oligonucleotide
aaccuucccaaac

SEQ ID NO: 891 - RNA, 14 nt, Artificial Sequence
  Description of Artificial Sequence: Synthetic oligonucleotide
ccaagcuuagaacu

SEQ ID NO: 892 - RNA, 15 nt, Artificial Sequence
  Description of Artificial Sequence: Synthetic oligonucleotide
agcuuagaacuuuaa

SEQ ID NO: 893 - RNA, 11 nt, Artificial Sequence
  Description of Artificial Sequence: Synthetic oligonucleotide
aagaccaccac

SEQ ID NO: 894 - RNA, 14 nt, Artificial Sequence
  Description of Artificial Sequence: Synthetic oligonucleotide
gcgagaaauaaagu

SEQ ID NO: 895 - RNA, 14 nt, Artificial Sequence
  Description of Artificial Sequence: Synthetic oligonucleotide
cgagaaauaaaguu

SEQ ID NO: 896 - RNA, 12 nt, Artificial Sequence
  Description of Artificial Sequence: Synthetic oligonucleotide
aggaaaugaucc

SEQ ID NO: 897 - RNA, 13 nt, Artificial Sequence
  Description of Artificial Sequence: Synthetic oligonucleotide
gaagaaaugaaac

SEQ ID NO: 898 - RNA, 13 nt, Artificial Sequence
  Description of Artificial Sequence: Synthetic oligonucleotide
guuuccauccucc

SEQ ID NO: 899 - RNA, 15 nt, Artificial Sequence
  Description of Artificial Sequence: Synthetic oligonucleotide
acugaaaaucuuuga

SEQ ID NO: 900 - RNA, 11 nt, Artificial Sequence
  Description of Artificial Sequence: Synthetic oligonucleotide
ugccguucagg

SEQ ID NO: 901 - RNA, 13 nt, Artificial Sequence
  Description of Artificial Sequence: Synthetic oligonucleotide
caggguccagaag

SEQ ID NO: 902 - RNA, 13 nt, Artificial Sequence
  Description of Artificial Sequence: Synthetic oligonucleotide
ucaagacugcuug

SEQ ID NO: 903 - RNA, 13 nt, Artificial Sequence
  Description of Artificial Sequence: Synthetic oligonucleotide
uccaugucuuugg

SEQ ID NO: 904 - RNA, 11 nt, Artificial Sequence
  Description of Artificial Sequence: Synthetic oligonucleotide
gccugaaacac

SEQ ID NO: 905 - RNA, 12 nt, Artificial Sequence
  Description of Artificial Sequence: Synthetic oligonucleotide
ucucuguaccuc

SEQ ID NO: 906 - RNA, 12 nt, Artificial Sequence
  Description of Artificial Sequence: Synthetic oligonucleotide
agcaagacaaga

SEQ ID NO: 907 - RNA, 13 nt, Artificial Sequence
  Description of Artificial Sequence: Synthetic oligonucleotide
gcaagacaagaaa

SEQ ID NO: 908 - RNA, 12 nt, Artificial Sequence
  Description of Artificial Sequence: Synthetic oligonucleotide
uguacaagaucc

SEQ ID NO: 909 - RNA, 12 nt, Artificial Sequence
  Description of Artificial Sequence: Synthetic oligonucleotide
cguacuugcaga

SEQ ID NO: 910 - RNA, 13 nt, Artificial Sequence
  Description of Artificial Sequence: Synthetic oligonucleotide
cgaucgauacaga

SEQ ID NO: 911 - RNA, 13 nt, Artificial Sequence
  Description of Artificial Sequence: Synthetic oligonucleotide
uauaaaaauaaau

SEQ ID NO: 912 - RNA, 13 nt, Artificial Sequence
  Description of Artificial Sequence: Synthetic oligonucleotide
uaaaaauaaauau

SEQ ID NO: 913 - RNA, 13 nt, Artificial Sequence
  Description of Artificial Sequence: Synthetic oligonucleotide
uuugacugcugug

SEQ ID NO: 914 - RNA, 13 nt, Artificial Sequence
  Description of Artificial Sequence: Synthetic oligonucleotide
ggagaugagagac

SEQ ID NO: 915 - RNA, 10 nt, Artificial Sequence
  Description of Artificial Sequence: Synthetic oligonucleotide
ucccacuugg

SEQ ID NO: 916 - RNA, 10 nt, Artificial Sequence
  Description of Artificial Sequence: Synthetic oligonucleotide
guucacggcc

SEQ ID NO: 917 - RNA, 12 nt, Artificial Sequence
  Description of Artificial Sequence: Synthetic oligonucleotide
accaucacacca

SEQ ID NO: 918 - RNA, 10 nt, Artificial Sequence
  Description of Artificial Sequence: Synthetic oligonucleotide
cugcggguuu

SEQ ID NO: 919 - RNA, 9 nt, Artificial Sequence
  Description of Artificial Sequence: Synthetic oligonucleotide
uccaguuug

SEQ ID NO: 920 - RNA, 12 nt, Artificial Sequence
  Description of Artificial Sequence: Synthetic oligonucleotide
uuaaggacuucu

SEQ ID NO: 921 - RNA, 12 nt, Artificial Sequence
  Description of Artificial Sequence: Synthetic oligonucleotide
agugggacagag

SEQ ID NO: 922 - RNA, 13 nt, Artificial Sequence
  Description of Artificial Sequence: Synthetic oligonucleotide
auuuguuauugug

SEQ ID NO: 923 - RNA, 12 nt, Artificial Sequence
  Description of Artificial Sequence: Synthetic oligonucleotide
ucaaaugcauuu

SEQ ID NO: 924 - RNA, 9 nt, Artificial Sequence
  Description of Artificial Sequence: Synthetic oligonucleotide
aggaaagcc

SEQ ID NO: 925 - RNA, 10 nt, Artificial Sequence
  Description of Artificial Sequence: Synthetic oligonucleotide
ggaaagcccu

SEQ ID NO: 926 - RNA, 11 nt, Artificial Sequence
  Description of Artificial Sequence: Synthetic oligonucleotide
ccagcauggcc

SEQ ID NO: 927 - RNA, 10 nt, Artificial Sequence
  Description of Artificial Sequence: Synthetic oligonucleotide
uucucccuga

SEQ ID NO: 928 - RNA, 11 nt, Artificial Sequence
  Description of Artificial Sequence: Synthetic oligonucleotide
aagaagcccuu

SEQ ID NO: 929 - RNA, 11 nt, Artificial Sequence
  Description of Artificial Sequence: Synthetic oligonucleotide
gaagcccuuca

SEQ ID NO: 930 - RNA, 10 nt, Artificial Sequence
  Description of Artificial Sequence: Synthetic oligonucleotide
cccuucagcg

SEQ ID NO: 931 - RNA, 10 nt, Artificial Sequence
  Description of Artificial Sequence: Synthetic oligonucleotide
cuucagcggc

SEQ ID NO: 932 - RNA, 11 nt, Artificial Sequence
  Description of Artificial Sequence: Synthetic oligonucleotide
cagcggccagu

SEQ ID NO: 933 - RNA, 11 nt, Artificial Sequence
  Description of Artificial Sequence: Synthetic oligonucleotide
gaaaagcuccg

SEQ ID NO: 934 - RNA, 10 nt, Artificial Sequence
  Description of Artificial Sequence: Synthetic oligonucleotide
aaagcuccgg

SEQ ID NO: 935 - RNA, 12 nt, Artificial Sequence
  Description of Artificial Sequence: Synthetic oligonucleotide
gucaacagucug

SEQ ID NO: 936 - RNA, 12 nt, Artificial Sequence
  Description of Artificial Sequence: Synthetic oligonucleotide
agaguucaaaag

SEQ ID NO: 937 - RNA, 12 nt, Artificial Sequence
  Description of Artificial Sequence: Synthetic oligonucleotide
gaguucaaaagc

SEQ ID NO: 938 - RNA, 11 nt, Artificial Sequence
  Description of Artificial Sequence: Synthetic oligonucleotide
ucaaaagcccu

SEQ ID NO: 939 - RNA, 11 nt, Artificial Sequence
  Description of Artificial Sequence: Synthetic oligonucleotide
caaaagcccuu

SEQ ID NO: 940 - RNA, 11 nt, Artificial Sequence
  Description of Artificial Sequence: Synthetic oligonucleotide
aaagcccuuca

SEQ ID NO: 941 - RNA, 11 nt, Artificial Sequence
  Description of Artificial Sequence: Synthetic oligonucleotide
aagcccuucag

SEQ ID NO: 942 - RNA, 12 nt, Artificial Sequence
  Description of Artificial Sequence: Synthetic oligonucleotide
ugaagccgcucg

SEQ ID NO: 943 - RNA, 11 nt, Artificial Sequence
  Description of Artificial Sequence: Synthetic oligonucleotide
acgccagucaa

SEQ ID NO: 944 - RNA, 12 nt, Artificial Sequence
  Description of Artificial Sequence: Synthetic oligonucleotide
ucuuggugcgug

SEQ ID NO: 945 - RNA, 13 nt, Artificial Sequence
  Description of Artificial Sequence: Synthetic oligonucleotide
uuggauucaucag

SEQ ID NO: 946 - RNA, 12 nt, Artificial Sequence
  Description of Artificial Sequence: Synthetic oligonucleotide
ggaauaccuaag

SEQ ID NO: 947 - RNA, 11 nt, Artificial Sequence
  Description of Artificial Sequence: Synthetic oligonucleotide
uuugaggcuca

SEQ ID NO: 948 - RNA, 10 nt, Artificial Sequence
  Description of Artificial Sequence: Synthetic oligonucleotide
cuacaauugg

SEQ ID NO: 949 - RNA, 11 nt, Artificial Sequence
  Description of Artificial Sequence: Synthetic oligonucleotide
aguuaggagcc

SEQ ID NO: 950 - RNA, 12 nt, Artificial Sequence
  Description of Artificial Sequence: Synthetic oligonucleotide
gucaauauccac

SEQ ID NO: 951 - RNA, 12 nt, Artificial Sequence
  Description of Artificial Sequence: Synthetic oligonucleotide
uguucagucaca

SEQ ID NO: 952 - RNA, 11 nt, Artificial Sequence
  Description of Artificial Sequence: Synthetic oligonucleotide
cacacacauac

SEQ ID NO: 953 - RNA, 11 nt, Artificial Sequence
  Description of Artificial Sequence: Synthetic oligonucleotide
uccuuuugcuu

SEQ ID NO: 954 - RNA, 15 nt, Artificial Sequence
  Description of Artificial Sequence: Synthetic oligonucleotide
uuuaaaguaauuuuu

SEQ ID NO: 955 - RNA, 12 nt, Artificial Sequence
  Description of Artificial Sequence: Synthetic oligonucleotide
aacagucaaugg

SEQ ID NO: 956 - RNA, 12 nt, Artificial Sequence
  Description of Artificial Sequence: Synthetic oligonucleotide
cgacaaaccaau

SEQ ID NO: 957 - RNA, 11 nt, Artificial Sequence
  Description of Artificial Sequence: Synthetic oligonucleotide
cugcuaccacu

SEQ ID NO: 958 - RNA, 12 nt, Artificial Sequence
  Description of Artificial Sequence: Synthetic oligonucleotide
caagcggucuua

SEQ ID NO: 959 - RNA, 12 nt, Artificial Sequence
  Description of Artificial Sequence: Synthetic oligonucleotide
gucuuaccggcu

SEQ ID NO: 960 - RNA, 10 nt, Artificial Sequence
  Description of Artificial Sequence: Synthetic oligonucleotide
auggguuacc

SEQ ID NO: 961 - RNA, 10 nt, Artificial Sequence
  Description of Artificial Sequence: Synthetic oligonucleotide
uuaccugcga

SEQ ID NO: 962 - RNA, 11 nt, Artificial Sequence
  Description of Artificial Sequence: Synthetic oligonucleotide
aucuugcugag

SEQ ID NO: 963 - RNA, 12 nt, Artificial Sequence
  Description of Artificial Sequence: Synthetic oligonucleotide
gcauaaaacagu

SEQ ID NO: 964 - RNA, 11 nt, Artificial Sequence
  Description of Artificial Sequence: Synthetic oligonucleotide
uccuuuauccu

SEQ ID NO: 965 - RNA, 11 nt, Artificial Sequence
  Description of Artificial Sequence: Synthetic oligonucleotide
aacgcaaguug

SEQ ID NO: 966 - RNA, 12 nt, Artificial Sequence
  Description of Artificial Sequence: Synthetic oligonucleotide
aacugaaaccau

SEQ ID NO: 967 - RNA, 13 nt, Artificial Sequence
  Description of Artificial Sequence: Synthetic oligonucleotide
cuuuguuaaauau

SEQ ID NO: 968 - RNA, 13 nt, Artificial Sequence
  Description of Artificial Sequence: Synthetic oligonucleotide
uauauuaaaaguu

SEQ ID NO: 969 - RNA, 12 nt, Artificial Sequence
  Description of Artificial Sequence: Synthetic oligonucleotide
uuuugacuuaac

SEQ ID NO: 970 - RNA, 12 nt, Artificial Sequence
  Description of Artificial Sequence: Synthetic oligonucleotide
caaacucagcac

SEQ ID NO: 971 - RNA, 10 nt, Artificial Sequence
  Description of Artificial Sequence: Synthetic oligonucleotide
gcugaccuca

SEQ ID NO: 972 - RNA, 13 nt, Artificial Sequence
  Description of Artificial Sequence: Synthetic oligonucleotide
uuauucagaucgc

SEQ ID NO: 973 - RNA, 12 nt, Artificial Sequence
  Description of Artificial Sequence: Synthetic oligonucleotide
ggguucugggau

SEQ ID NO: 974 - RNA, 14 nt, Artificial Sequence
  Description of Artificial Sequence: Synthetic oligonucleotide
uauuggaaauuaug

SEQ ID NO: 975 - RNA, 12 nt, Artificial Sequence
  Description of Artificial Sequence: Synthetic oligonucleotide
uggaagcacuag

SEQ ID NO: 976 - RNA, 12 nt, Artificial Sequence
  Description of Artificial Sequence: Synthetic oligonucleotide
uuuuuaugugga

SEQ ID NO: 977 - RNA, 11 nt, Artificial Sequence
  Description of Artificial Sequence: Synthetic oligonucleotide
gaauugguaga

SEQ ID NO: 978 - RNA, 12 nt, Artificial Sequence
  Description of Artificial Sequence: Synthetic oligonucleotide
uagacuuggaga

SEQ ID NO: 979 - RNA, 12 nt, Artificial Sequence
  Description of Artificial Sequence: Synthetic oligonucleotide
uacaguauucca

SEQ ID NO: 980 - RNA, 14 nt, Artificial Sequence
  Description of Artificial Sequence: Synthetic oligonucleotide
cacugaugaauuaa

SEQ ID NO: 981 - RNA, 11 nt, Artificial Sequence
  Description of Artificial Sequence: Synthetic oligonucleotide
cacaucaucac

SEQ ID NO: 982 - RNA, 12 nt, Artificial Sequence
  Description of Artificial Sequence: Synthetic oligonucleotide
ucaccaaacaga

SEQ ID NO: 983 - RNA, 11 nt, Artificial Sequence
  Description of Artificial Sequence: Synthetic oligonucleotide
gaacaugaugg

SEQ ID NO: 984 - RNA, 11 nt, Artificial Sequence
  Description of Artificial Sequence: Synthetic oligonucleotide
auguagacugc

SEQ ID NO: 985 - RNA, 12 nt, Artificial Sequence
  Description of Artificial Sequence: Synthetic oligonucleotide
gaucuauuuaug

SEQ ID NO: 986 - RNA, 11 nt, Artificial Sequence
  Description of Artificial Sequence: Synthetic oligonucleotide
cacuauuauca

SEQ ID NO: 987 - RNA, 10 nt, Artificial Sequence
  Description of Artificial Sequence: Synthetic oligonucleotide
ucaguucugc

SEQ ID NO: 988 - RNA, 12 nt, Artificial Sequence
  Description of Artificial Sequence: Synthetic oligonucleotide
gauuaaaccuac

SEQ ID NO: 989 - RNA, 12 nt, Artificial Sequence
  Description of Artificial Sequence: Synthetic oligonucleotide
uaaaauccuucu

SEQ ID NO: 990 - RNA, 11 nt, Artificial Sequence
  Description of Artificial Sequence: Synthetic oligonucleotide
augcuguagac

SEQ ID NO: 991 - RNA, 12 nt, Artificial Sequence
  Description of Artificial Sequence: Synthetic oligonucleotide
ugauaggaauag

SEQ ID NO: 992 - RNA, 10 nt, Artificial Sequence
  Description of Artificial Sequence: Synthetic oligonucleotide
auggcccuga

SEQ ID NO: 993 - RNA, 10 nt, Artificial Sequence
  Description of Artificial Sequence: Synthetic oligonucleotide
uccucaagca

SEQ ID NO: 994 - RNA, 9 nt, Artificial Sequence
  Description of Artificial Sequence: Synthetic oligonucleotide
uucagccca

SEQ ID NO: 995 - RNA, 10 nt, Artificial Sequence
  Description of Artificial Sequence: Synthetic oligonucleotide
cugcugaacc

SEQ ID NO: 996 - RNA, 11 nt, Artificial Sequence
  Description of Artificial Sequence: Synthetic oligonucleotide
aguucucuuca

SEQ ID NO: 997 - RNA, 10 nt, Artificial Sequence
  Description of Artificial Sequence: Synthetic oligonucleotide
cagccuagag

SEQ ID NO: 998 - RNA, 12 nt, Artificial Sequence
  Description of Artificial Sequence: Synthetic oligonucleotide
ucugugaagugu

SEQ ID NO: 999 - RNA, 13 nt, Artificial Sequence
  Description of Artificial Sequence: Synthetic oligonucleotide
gagaaaauuucaa

SEQ ID NO: 1000 - RNA, 10 nt, Artificial Sequence
  Description of Artificial Sequence: Synthetic oligonucleotide
auccuccuga

SEQ ID NO: 1001 - RNA, 11 nt, Artificial Sequence
  Description of Artificial Sequence: Synthetic oligonucleotide
ugacaucauau

SEQ ID NO: 1002 - RNA, 12 nt, Artificial Sequence
  Description of Artificial Sequence: Synthetic oligonucleotide
aucuucaucaua

SEQ ID NO: 1003 - RNA, 12 nt, Artificial Sequence
  Description of Artificial Sequence: Synthetic oligonucleotide
acuagcuauuaa

SEQ ID NO: 1004 - RNA, 13 nt, Artificial Sequence
  Description of Artificial Sequence: Synthetic oligonucleotide
cucuacuaaaaau

SEQ ID NO: 1005 - RNA, 11 nt, Artificial Sequence
  Description of Artificial Sequence: Synthetic oligonucleotide
cuaucucgccu

SEQ ID NO: 1006 - RNA, 12 nt, Artificial Sequence
  Description of Artificial Sequence: Synthetic oligonucleotide
uucgguccaguu

SEQ ID NO: 1007 - RNA, 10 nt, Artificial Sequence
  Description of Artificial Sequence: Synthetic oligonucleotide
auguagccgc

SEQ ID NO: 1008 - RNA, 11 nt, Artificial Sequence
  Description of Artificial Sequence: Synthetic oligonucleotide
gaggagacuug

SEQ ID NO: 1009 - RNA, 11 nt, Artificial Sequence
  Description of Artificial Sequence: Synthetic oligonucleotide
aguagugagga

SEQ ID NO: 1010 - RNA, 13 nt, Artificial Sequence
  Description of Artificial Sequence: Synthetic oligonucleotide
agaugaguacaaa

SEQ ID NO: 1011 - RNA, 12 nt, Artificial Sequence
  Description of Artificial Sequence: Synthetic oligonucleotide
uuguuaaugggc

SEQ ID NO: 1012 - RNA, 12 nt, Artificial Sequence
  Description of Artificial Sequence: Synthetic oligonucleotide
uuuuaauuuauu

SEQ ID NO: 1013 - RNA, 11 nt, Artificial Sequence
  Description of Artificial Sequence: Synthetic oligonucleotide
auuuaaauaug

SEQ ID NO: 1014 - RNA, 12 nt, Artificial Sequence
  Description of Artificial Sequence: Synthetic oligonucleotide
auccuuuguuuc

SEQ ID NO: 1015 - RNA, 13 nt, Artificial Sequence
  Description of Artificial Sequence: Synthetic oligonucleotide
gucuaaguguuug

SEQ ID NO: 1016 - RNA, 11 nt, Artificial Sequence
  Description of Artificial Sequence: Synthetic oligonucleotide
ccugugacaaa

SEQ ID NO: 1017 - RNA, 12 nt, Artificial Sequence
  Description of Artificial Sequence: Synthetic oligonucleotide
caggcugaauua

SEQ ID NO: 1018 - RNA, 13 nt, Artificial Sequence
  Description of Artificial Sequence: Synthetic oligonucleotide
ucauucuuacaau

SEQ ID NO: 1019 - RNA, 14 nt, Artificial Sequence
  Description of Artificial Sequence: Synthetic oligonucleotide
cauucuuacaauug

SEQ ID NO: 1020 - RNA, 11 nt, Artificial Sequence
  Description of Artificial Sequence: Synthetic oligonucleotide
agagaguguac

SEQ ID NO: 1021 - RNA, 11 nt, Artificial Sequence
  Description of Artificial Sequence: Synthetic oligonucleotide
gaacucagcag

SEQ ID NO: 1022 - RNA, 12 nt, Artificial Sequence
  Description of Artificial Sequence: Synthetic oligonucleotide
uuauuuucagua

SEQ ID NO: 1023 - RNA, 11 nt, Artificial Sequence
  Description of Artificial Sequence: Synthetic oligonucleotide
cuuaaauggaa

SEQ ID NO: 1024 - RNA, 12 nt, Artificial Sequence
  Description of Artificial Sequence: Synthetic oligonucleotide
gccuaaaauugu

SEQ ID NO: 1025 - RNA, 12 nt, Artificial Sequence
  Description of Artificial Sequence: Synthetic oligonucleotide
acuaacaucugg

SEQ ID NO: 1026 - RNA, 11 nt, Artificial Sequence
  Description of Artificial Sequence: Synthetic oligonucleotide
gacugugagcu

SEQ ID NO: 1027 - RNA, 13 nt, Artificial Sequence
  Description of Artificial Sequence: Synthetic oligonucleotide
gcuuuuuauuaau

SEQ ID NO: 1028 - RNA, 12 nt, Artificial Sequence
  Description of Artificial Sequence: Synthetic oligonucleotide
ucuucuuacauu

SEQ ID NO: 1029 - RNA, 14 nt, Artificial Sequence
  Description of Artificial Sequence: Synthetic oligonucleotide
auuuguaaaaaugu

SEQ ID NO: 1030 - RNA, 14 nt, Artificial Sequence
  Description of Artificial Sequence: Synthetic oligonucleotide
ucuuaauucauauu

SEQ ID NO: 1031 - RNA, 12 nt, Artificial Sequence
  Description of Artificial Sequence: Synthetic oligonucleotide
aacuaaucauga

SEQ ID NO: 1032 - RNA, 11 nt, Artificial Sequence
  Description of Artificial Sequence: Synthetic oligonucleotide
cugcucuuggg

SEQ ID NO: 1033 - RNA, 12 nt, Artificial Sequence
  Description of Artificial Sequence: Synthetic oligonucleotide
aguagcuuugag

SEQ ID NO: 1034 - RNA, 13 nt, Artificial Sequence
  Description of Artificial Sequence: Synthetic oligonucleotide
acguaauauuuca

SEQ ID NO: 1035 - RNA, 12 nt, Artificial Sequence
  Description of Artificial Sequence: Synthetic oligonucleotide
auucucuucacu

SEQ ID NO: 1036 - RNA, 13 nt, Artificial Sequence
  Description of Artificial Sequence: Synthetic oligonucleotide
uaaugcuaagaaa

SEQ ID NO: 1037 - RNA, 11 nt, Artificial Sequence
  Description of Artificial Sequence: Synthetic oligonucleotide
cugaaaaucaa

SEQ ID NO: 1038 - RNA, 13 nt, Artificial Sequence
  Description of Artificial Sequence: Synthetic oligonucleotide
auaugauuacuuu

SEQ ID NO: 1039 - RNA, 13 nt, Artificial Sequence
  Description of Artificial Sequence: Synthetic oligonucleotide
auuuuguucuaca

SEQ ID NO: 1040 - RNA, 11 nt, Artificial Sequence
  Description of Artificial Sequence: Synthetic oligonucleotide
ccgggacucuc

SEQ ID NO: 1041 - RNA, 13 nt, Artificial Sequence
  Description of Artificial Sequence: Synthetic oligonucleotide
cuuuaaaguaaag

SEQ ID NO: 1042 - RNA, 12 nt, Artificial Sequence
  Description of Artificial Sequence: Synthetic oligonucleotide
cuggaagccugg

SEQ ID NO: 1043 - RNA, 13 nt, Artificial Sequence
  Description of Artificial Sequence: Synthetic oligonucleotide
aaacaaaagagag

SEQ ID NO: 1044 - RNA, 12 nt, Artificial Sequence
  Description of Artificial Sequence: Synthetic oligonucleotide
ucaguuaugccg

SEQ ID NO: 1045 - RNA, 12 nt, Artificial Sequence
  Description of Artificial Sequence: Synthetic oligonucleotide
aaaagaagucca

SEQ ID NO: 1046 - RNA, 10 nt, Artificial Sequence
  Description of Artificial Sequence: Synthetic oligonucleotide
ggugagguua

SEQ ID NO: 1047 - RNA, 10 nt, Artificial Sequence
  Description of Artificial Sequence: Synthetic oligonucleotide
ggaagaggac

SEQ ID NO: 1048 - RNA, 12 nt, Artificial Sequence
  Description of Artificial Sequence: Synthetic oligonucleotide
agcaaguauugu

SEQ ID NO: 1049 - RNA, 11 nt, Artificial Sequence
  Description of Artificial Sequence: Synthetic oligonucleotide
uuguagcacuc

SEQ ID NO: 1050 - RNA, 13 nt, Artificial Sequence
  Description of Artificial Sequence: Synthetic oligonucleotide
caaaaccacaaau

SEQ ID NO: 1051 - RNA, 11 nt, Artificial Sequence
  Description of Artificial Sequence: Synthetic oligonucleotide
aagcccauaca

SEQ ID NO: 1052 - RNA, 10 nt, Artificial Sequence
  Description of Artificial Sequence: Synthetic oligonucleotide
gcccauacag

SEQ ID NO: 1053 - RNA, 11 nt, Artificial Sequence
  Description of Artificial Sequence: Synthetic oligonucleotide
agaaaccuucc

SEQ ID NO: 1054 - RNA, 9 nt, Artificial Sequence
  Description of Artificial Sequence: Synthetic oligonucleotide
uauaccuac

SEQ ID NO: 1055 - RNA, 12 nt, Artificial Sequence
  Description of Artificial Sequence: Synthetic oligonucleotide
ccaguuuucgga

SEQ ID NO: 1056 - RNA, 8 nt, Artificial Sequence
  Description of Artificial Sequence: Synthetic oligonucleotide
gaacaggg

SEQ ID NO: 1057 - RNA, 12 nt, Artificial Sequence
  Description of Artificial Sequence: Synthetic oligonucleotide
uaacuuuccagu

SEQ ID NO: 1058 - RNA, 13 nt, Artificial Sequence
  Description of Artificial Sequence: Synthetic oligonucleotide
aaguuugguuuug

SEQ ID NO: 1059 - RNA, 11 nt, Artificial Sequence
  Description of Artificial Sequence: Synthetic oligonucleotide
uucccacugua

SEQ ID NO: 1060 - RNA, 12 nt, Artificial Sequence
  Description of Artificial Sequence: Synthetic oligonucleotide
gauaccauauga

SEQ ID NO: 1061 - RNA, 10 nt, Artificial Sequence
  Description of Artificial Sequence: Synthetic oligonucleotide
acaugggcug

SEQ ID NO: 1062 - RNA, 12 nt, Artificial Sequence
  Description of Artificial Sequence: Synthetic oligonucleotide
aacuuuuucaua

SEQ ID NO: 1063 - RNA, 11 nt, Artificial Sequence
  Description of Artificial Sequence: Synthetic oligonucleotide
augaggccgga

SEQ ID NO: 1064 - RNA, 10 nt, Artificial Sequence
  Description of Artificial Sequence: Synthetic oligonucleotide
cugcauuugu

SEQ ID NO: 1065 - RNA, 12 nt, Artificial Sequence
  Description of Artificial Sequence: Synthetic oligonucleotide
auguuuacuacc

SEQ ID NO: 1066 - RNA, 14 nt, Artificial Sequence
  Description of Artificial Sequence: Synthetic oligonucleotide
auuuuuugaugaaa

SEQ ID NO: 1067 - RNA, 13 nt, Artificial Sequence
  Description of Artificial Sequence: Synthetic oligonucleotide
agugugugaauuu

SEQ ID NO: 1068 - RNA, 12 nt, Artificial Sequence
  Description of Artificial Sequence: Synthetic oligonucleotide
agcaauguaugu

SEQ ID NO: 1069 - RNA, 13 nt, Artificial Sequence
  Description of Artificial Sequence: Synthetic oligonucleotide
aagcacauauaua

SEQ ID NO: 1070 - RNA, 13 nt, Artificial Sequence
  Description of Artificial Sequence: Synthetic oligonucleotide
uaauaguuucucc

SEQ ID NO: 1071 - RNA, 12 nt, Artificial Sequence
  Description of Artificial Sequence: Synthetic oligonucleotide
guuucuccaaau

SEQ ID NO: 1072 - RNA, 12 nt, Artificial Sequence
  Description of Artificial Sequence: Synthetic oligonucleotide
acuuccuagaaa

SEQ ID NO: 1073 - RNA, 12 nt, Artificial Sequence
  Description of Artificial Sequence: Synthetic oligonucleotide
acaccauauaug

SEQ ID NO: 1074 - RNA, 13 nt, Artificial Sequence
  Description of Artificial Sequence: Synthetic oligonucleotide
uauaugaauggag

SEQ ID NO: 1075 - RNA, 12 nt, Artificial Sequence
  Description of Artificial Sequence: Synthetic oligonucleotide
cauuuacaggga

SEQ ID NO: 1076 - RNA, 12 nt, Artificial Sequence
  Description of Artificial Sequence: Synthetic oligonucleotide
auuuacagggac

SEQ ID NO: 1077 - RNA, 9 nt, Artificial Sequence
  Description of Artificial Sequence: Synthetic oligonucleotide
gggaccuga

SEQ ID NO: 1078 - RNA, 13 nt, Artificial Sequence
  Description of Artificial Sequence: Synthetic oligonucleotide
guuugacugcauc

SEQ ID NO: 1079 - RNA, 12 nt, Artificial Sequence
  Description of Artificial Sequence: Synthetic oligonucleotide
uugacugcaucg

SEQ ID NO: 1080 - RNA, 11 nt, Artificial Sequence
  Description of Artificial Sequence: Synthetic oligonucleotide
aguucacaggg

SEQ ID NO: 1081 - RNA, 12 nt, Artificial Sequence
  Description of Artificial Sequence: Synthetic oligonucleotide
gcaccucugucc

SEQ ID NO: 1082 - RNA, 14 nt, Artificial Sequence
  Description of Artificial Sequence: Synthetic oligonucleotide
guuugucuuuuuaa

SEQ ID NO: 1083 - RNA, 13 nt, Artificial Sequence
  Description of Artificial Sequence: Synthetic oligonucleotide
uugucuuuuuaag

SEQ ID NO: 1084 - RNA, 12 nt, Artificial Sequence
  Description of Artificial Sequence: Synthetic oligonucleotide
cuaaagguuguc

SEQ ID NO: 1085 - RNA, 11 nt, Artificial Sequence
  Description of Artificial Sequence: Synthetic oligonucleotide
agguugucgac

SEQ ID NO: 1086 - RNA, 12 nt, Artificial Sequence
  Description of Artificial Sequence: Synthetic oligonucleotide
ccuggcaauugu

SEQ ID NO: 1087 - RNA, 11 nt, Artificial Sequence
  Description of Artificial Sequence: Synthetic oligonucleotide
guggugcgagg

SEQ ID NO: 1088 - RNA, 12 nt, Artificial Sequence
  Description of Artificial Sequence: Synthetic oligonucleotide
gagacaugaaau

SEQ ID NO: 1089 - RNA, 12 nt, Artificial Sequence
  Description of Artificial Sequence: Synthetic oligonucleotide
uauauuucucca

SEQ ID NO: 1090 - RNA, 9 nt, Artificial Sequence
  Description of Artificial Sequence: Synthetic oligonucleotide
augaaggcu

SEQ ID NO: 1091 - RNA, 10 nt, Artificial Sequence
  Description of Artificial Sequence: Synthetic oligonucleotide
cuggaguggu

SEQ ID NO: 1092 - RNA, 10 nt, Artificial Sequence
  Description of Artificial Sequence: Synthetic oligonucleotide
ggaagagagg

SEQ ID NO: 1093 - RNA, 11 nt, Artificial Sequence
  Description of Artificial Sequence: Synthetic oligonucleotide
uugcaucgggc

SEQ ID NO: 1094 - RNA, 12 nt, Artificial Sequence
  Description of Artificial Sequence: Synthetic oligonucleotide
uauccuacugug

SEQ ID NO: 1095 - RNA, 12 nt, Artificial Sequence
  Description of Artificial Sequence: Synthetic oligonucleotide
ccuacuguguaa

SEQ ID NO: 1096 - RNA, 11 nt, Artificial Sequence
  Description of Artificial Sequence: Synthetic oligonucleotide
cuuguagugua

SEQ ID NO: 1097 - RNA, 12 nt, Artificial Sequence
  Description of Artificial Sequence: Synthetic oligonucleotide
cuuuguugauug

SEQ ID NO: 1098 - RNA, 13 nt, Artificial Sequence
  Description of Artificial Sequence: Synthetic oligonucleotide
uuguugauugaaa

SEQ ID NO: 1099 - RNA, 14 nt, Artificial Sequence
  Description of Artificial Sequence: Synthetic oligonucleotide
ucuuuuucuuccau

SEQ ID NO: 1100 - RNA, 12 nt, Artificial Sequence
  Description of Artificial Sequence: Synthetic oligonucleotide
aucuuccuucua

SEQ ID NO: 1101 - RNA, 12 nt, Artificial Sequence
  Description of Artificial Sequence: Synthetic oligonucleotide
ugaaugcuucau

SEQ ID NO: 1102 - RNA, 12 nt, Artificial Sequence
  Description of Artificial Sequence: Synthetic oligonucleotide
gaaugcuucaug

SEQ ID NO: 1103 - RNA, 12 nt, Artificial Sequence
  Description of Artificial Sequence: Synthetic oligonucleotide
auucuacuuuga

SEQ ID NO: 1104 - RNA, 12 nt, Artificial Sequence
  Description of Artificial Sequence: Synthetic oligonucleotide
gcaacuacagac

SEQ ID NO: 1105 - RNA, 12 nt, Artificial Sequence
  Description of Artificial Sequence: Synthetic oligonucleotide
accaaggucaac

SEQ ID NO: 1106 - RNA, 12 nt, Artificial Sequence
  Description of Artificial Sequence: Synthetic oligonucleotide
gacuaucucgac

SEQ ID NO: 1107 - RNA, 12 nt, Artificial Sequence
  Description of Artificial Sequence: Synthetic oligonucleotide
accuucccaaac

SEQ ID NO: 1108 - RNA, 13 nt, Artificial Sequence
  Description of Artificial Sequence: Synthetic oligonucleotide
caagcuuagaacu

SEQ ID NO: 1109 - RNA, 14 nt, Artificial Sequence
  Description of Artificial Sequence: Synthetic oligonucleotide
gcuuagaacuuuaa

SEQ ID NO: 1110 - RNA, 13 nt, Artificial Sequence
  Description of Artificial Sequence: Synthetic oligonucleotide
aacuuuaagcaac

SEQ ID NO: 1111 - RNA, 10 nt, Artificial Sequence
  Description of Artificial Sequence: Synthetic oligonucleotide
agaccaccac

SEQ ID NO: 1112 - RNA, 13 nt, Artificial Sequence
  Description of Artificial Sequence: Synthetic oligonucleotide
cgagaaauaaagu

SEQ ID NO: 1113 - RNA, 13 nt, Artificial Sequence
  Description of Artificial Sequence: Synthetic oligonucleotide
gagaaauaaaguu

SEQ ID NO: 1114 - RNA, 11 nt, Artificial Sequence
  Description of Artificial Sequence: Synthetic oligonucleotide
ggaaaugaucc

SEQ ID NO: 1115 - RNA, 12 nt, Artificial Sequence
  Description of Artificial Sequence: Synthetic oligonucleotide
aagaaaugaaac

SEQ ID NO: 1116 - RNA, 12 nt, Artificial Sequence
  Description of Artificial Sequence: Synthetic oligonucleotide
uuuccauccucc

SEQ ID NO: 1117 - RNA, 14 nt, Artificial Sequence
  Description of Artificial Sequence: Synthetic oligonucleotide
cugaaaaucuuuga

SEQ ID NO: 1118 - RNA, 10 nt, Artificial Sequence
  Description of Artificial Sequence: Synthetic oligonucleotide
gccguucagg

SEQ ID NO: 1119 - RNA, 12 nt, Artificial Sequence
  Description of Artificial Sequence: Synthetic oligonucleotide
aggguccagaag

SEQ ID NO: 1120 - RNA, 12 nt, Artificial Sequence
  Description of Artificial Sequence: Synthetic oligonucleotide
caagacugcuug

SEQ ID NO: 1121 - RNA, 12 nt, Artificial Sequence
  Description of Artificial Sequence: Synthetic oligonucleotide
ccaugucuuugg

SEQ ID NO: 1122 - RNA, 10 nt, Artificial Sequence
  Description of Artificial Sequence: Synthetic oligonucleotide
ccugaaacac

SEQ ID NO: 1123 - RNA, 11 nt, Artificial Sequence
  Description of Artificial Sequence: Synthetic oligonucleotide
cucuguaccuc

SEQ ID NO: 1124 - RNA, 11 nt, Artificial Sequence
  Description of Artificial Sequence: Synthetic oligonucleotide
gcaagacaaga

SEQ ID NO: 1125 - RNA, 12 nt, Artificial Sequence
  Description of Artificial Sequence: Synthetic oligonucleotide
caagacaagaaa

SEQ ID NO: 1126 - RNA, 11 nt, Artificial Sequence
  Description of Artificial Sequence: Synthetic oligonucleotide
guacaagaucc

SEQ ID NO: 1127 - RNA, 11 nt, Artificial Sequence
  Description of Artificial Sequence: Synthetic oligonucleotide
guacuugcaga

SEQ ID NO: 1128 - RNA, 12 nt, Artificial Sequence
  Description of Artificial Sequence: Synthetic oligonucleotide
gaucgauacaga

SEQ ID NO: 1129 - RNA, 12 nt, Artificial Sequence
  Description of Artificial Sequence: Synthetic oligonucleotide
auaaaaauaaau

SEQ ID NO: 1130 - RNA, 12 nt, Artificial Sequence
  Description of Artificial Sequence: Synthetic oligonucleotide
aaaaauaaauau

SEQ ID NO: 1131 - RNA, 12 nt, Artificial Sequence
  Description of Artificial Sequence: Synthetic oligonucleotide
uugacugcugug

SEQ ID NO: 1132 - RNA, 12 nt, Artificial Sequence
  Description of Artificial Sequence: Synthetic oligonucleotide
gagaugagagac

SEQ ID NO: 1133 - RNA, 9 nt, Artificial Sequence
  Description of Artificial Sequence: Synthetic oligonucleotide
cccacuugg

SEQ ID NO: 1134 - RNA, 3008 nt, Homo sapiens
uaauuaugggucuguaaccacccuggacugggugcuccucacugacggacuugucugaaccucucuuugucuccagcgcccagcacugggccuggcaaaaccugagacgcccgguacauguuggccaaaugaaugaaccagauucagaccggcaggggcgcugugguuuaggaggggccugggguuucucccaggagguuuuugggcuugcgcuggagggcucuggacucccguuugcgccaguggccugcauccugguccugucuuccucauguuugaauuucuuugcuuuccuagucuggggagcagggaggagcccugugcccugucccaggauccauggguaggaacaccauggacagggagagcaaacggggccaucugucaccaggggcuuagggaaggccgagccagccugggucaaagaagucaaaggggcugccuggaggaggcagccugucagcuggugcaucagaggcuguggccaggccagcugggcucggggagcgccagccugagaggagcgcgugagcgucgcgggagccucgggcaccaugagcgacguggcuauugugaaggaggguuggcugcacaaacgaggggaguacaucaagaccuggcggccacgcuacuuccuccucaagaaugauggcaccuucauuggcuacaaggagcggccgcaggauguggaccaacgugaggcuccccucaacaacuucucuguggcgcagugccagcugaugaagacggagcggccccggcccaacaccuucaucauccgcugccugcaguggaccacugucaucgaacgcaccuuccauguggagacuccugaggagcgggaggaguggacaaccgccauccagacuguggcugacggccucaagaagcaggaggaggaggagauggacuuccggucgggcucacccagugacaacucaggggcugaagagauggaggugucccuggccaagcccaagcaccgcgugaccaugaacgaguuugaguaccugaagcugcugggcaagggcacuuucggcaaggugauccuggugaaggagaaggccacaggccgcuacuacgccaugaagauccucaagaaggaagucaucguggccaaggacgagguggcccacacacucaccgagaaccgcguccugcagaacuccaggcaccccuuccucacagcccugaaguacucuuuccagacccacgaccgccucugcuuugucauggaguacgccaacgggggcgagcuguucuuccaccugucccgggagcguguguucuccgaggaccgggcccgcuucuauggcgcugagauugugucagcccuggacuaccugcacucggagaagaacgugguguaccgggaccucaagcuggagaaccucaugcuggacaaggacgggcacauuaagaucacagacuucgggcugugcaaggaggggaucaaggacggugccaccaugaagaccuuuugcggcacaccugaguaccuggcccccgaggugcuggaggacaaugacuacggccgugcaguggacuggugggggcugggcguggucauguacgagaugaugugcggucgccugcccuucuacaaccaggaccaugagaagcuuuuugagcucauccucauggaggagauccgcuucccgcgcacgcuuggucccgaggccaaguccuugcuuucagggcugcucaagaaggaccccaagcagaggcuuggcgggggcuccgaggacgccaaggagaucaugcagcaucgcuucuuugccgguaucguguggcagcacguguacgagaagaagcucagcccacccuucaagccccaggucacgucggagacugacaccagguauuuugaugaggaguucacggcccagaugaucaccaucacaccaccugaccaagaugacagcauggaguguguggacagcgagcgcaggccccacuucccccaguucuccuacucggccagcggcacggccugaggcggcgguggacugcgcuggacgauagcuuggagggauggagaggcggccucgugccaugaucuguauuuaaugguuuuuauuucucgggugcauuugagagaagccacgcuguccucucgagcccagauggaaagacguuuuugugcugugggcagcacccucccccgcagcgggguagggaagaaaacuauccugcggguuuuaauuuauuucauccaguuuguucuccggguguggccucagcccucagaacaauccgauucacguagggaaauguuaaggacuucugcagcuaugcgcaauguggcauuggggggccgggcagguccugcccauguguccccucacucugucagccagccgcccugggcugucugucaccagcuaucugucaucucucuggggcccugggccucaguucaaccugguggcaccagaugcaaccucacuaugguaugcuggccagcacccucuccuggggguggcaggcacacagcagccccccagcacuaaggccgugucucugaggacgucaucggaggcugggccccugggaugggaccagggaugggggaugggccaggguuuacccagugggacagaggagcaagguuuaaauuuguuauuguguauuauguuguucaaaugcauuuuggggguuuuuaaucuuugugacaggaaagcccucccccuuccccuucugugucacaguucuuggugacugucccaccgggagccucccccucagaugaucucuccacgguagcacuugaccuuuucgacgcuuaaccuuuccgcugucgccccaggcccucccugacucccuguggggguggccaucccugggccccuccacgccuccuggccagacgcugccgcugccgcugcaccacggcguuuuuuuacaacauucaacuuuaguauuuuuacuauuauaauauaauauggaaccuucccuccaaauucuucaauaaaaguugcuuuucaaaaaaaaaaaaaaaaaaaaaa

SEQ ID NO: 1135 - RNA, 2878 nt, Homo sapiens
cggcaggaccgagcgcggcaggcggcuggcccagcgcagccagcgcggcccgaaggacgggagcaggcggccgagcaccgagcgcugggcaccgggcaccgagcggcggcggcacgcgaggcccggccccgagcagcgcccccgcccgccgcggccuccagcccggccccgcccagcgccggcccgcggggaugcggagcggcgggcgccggaggccgcggcccggcuaggcccgcgcucgcgcccggacgcggcggcccggggcuuagggaaggccgagccagccugggucaaagaagucaaaggggcugccuggaggaggcagccugucagcuggugcaucagaggcuguggccaggccagcugggcucggggagcgccagccugagaggagcgcgugagcgucgcgggagccucgggcaccaugagcgacguggcuauugugaaggaggguuggcugcacaaacgaggggaguacaucaagaccuggcggccacgcuacuuccuccucaagaaugauggcaccuucauuggcuacaaggagcggccgcaggauguggaccaacgugaggcuccccucaacaacuucucuguggcgcagugccagcugaugaagacggagcggccccggcccaacaccuucaucauccgcugccugcaguggaccacugucaucgaacgcaccuuccauguggagacuccugaggagcgggaggaguggacaaccgccauccagacuguggcugacggccucaagaagcaggaggaggaggagauggacuuccggucgggcucacccagugacaacucaggggcugaagagauggaggugucccuggccaagcccaagcaccgcgugaccaugaacgaguuugaguaccugaagcugcugggcaagggcacuuucggcaaggugauccuggugaaggagaaggccacaggccgcuacuacgccaugaagauccucaagaaggaagucaucguggccaaggacgagguggcccacacacucaccgagaaccgcguccugcagaacuccaggcaccccuuccucacagcccugaaguacucuuuccagacccacgaccgccucugcuuugucauggaguacgccaacgggggcgagcuguucuuccaccugucccgggagcguguguucuccgaggaccgggcccgcuucuauggcgcugagauugugucagcccuggacuaccugcacucggagaagaacgugguguaccgggaccucaagcuggagaaccucaugcuggacaaggacgggcacauuaagaucacagacuucgggcugugcaaggaggggaucaaggacggugccaccaugaagaccuuuugcggcacaccugaguaccuggcccccgaggugcuggaggacaaugacuacggccgugcaguggacuggugggggcugggcguggucauguacgagaugaugugcggucgccugcccuucuacaaccaggaccaugagaagcuuuuugagcucauccucauggaggagauccgcuucccgcgcacgcuuggucccgaggccaaguccuugcuuucagggcugcucaagaaggaccccaagcagaggcuuggcgggggcuccgaggacgccaaggagaucaugcagcaucgcuucuuugccgguaucguguggcagcacguguacgagaagaagcucagcccacccuucaagccccaggucacgucggagacugacaccagguauuuugaugaggaguucacggcccagaugaucaccaucacaccaccugaccaagaugacagcauggaguguguggacagcgagcgcaggccccacuucccccaguucuccuacucggccagcggcacggccugaggcggcgguggacugcgcuggacgauagcuuggagggauggagaggcggccucgugccaugaucuguauuuaaugguuuuuauuucucgggugcauuugagagaagccacgcuguccucucgagcccagauggaaagacguuuuugugcugugggcagcacccucccccgcagcgggguagggaagaaaacuauccugcggguuuuaauuuauuucauccaguuuguucuccggguguggccucagcccucagaacaauccgauucacguagggaaauguuaaggacuucugcagcuaugcgcaauguggcauuggggggccgggcagguccugcccauguguccccucacucugucagccagccgcccugggcugucugucaccagcuaucugucaucucucuggggcccugggccucaguucaaccugguggcaccagaugcaaccucacuaugguaugcuggccagcacccucuccuggggguggcaggcacacagcagccccccagcacuaaggccgugucucugaggacgucaucggaggcugggccccugggaugggaccagggaugggggaugggccaggguuuacccagugggacagaggagcaagguuuaaauuuguuauuguguauuauguuguucaaaugcauuuuggggguuuuuaaucuuugugacaggaaagcccucccccuuccccuucugugucacaguucuuggugacugucccaccgggagccucccccucagaugaucucuccacgguagcacuugaccuuuucgacgcuuaaccuuuccgcugucgccccaggcccucccugacucccuguggggguggccaucccugggccccuccacgccuccuggccagacgcugccgcugccgcugcaccacggcguuuuuuuacaacauucaacuuuaguauuuuuacuauuauaauauaauauggaaccuucccuccaaauucuucaauaaaaguugcuuuucaaaaaaaaaaaaaaaaaaaaaa

SEQ ID NO: 1136 - RNA, 2794 nt, Homo sapiens
cggcaggaccgagcgcggcaggcggcuggcccagcgcagccagcgcggcccgaaggacgggagcaggcggccgagcaccgagcgcugggcaccgggcaccgagcggcggcggcacgcgaggcccggccccgagcagcgcccccgcccgccgcggccuccagcccggccccgcccagcgccggcccgcggggaugcggagcggcgggcgccggaggccgcggcccggcuaggcccgcgcucgcgcccggacgcggcggcccgaggcuguggccaggccagcugggcucggggagcgccagccugagaggagcgcgugagcgucgcgggagccucgggcaccaugagcgacguggcuauugugaaggaggguuggcugcacaaacgaggggaguacaucaagaccuggcggccacgcuacuuccuccucaagaaugauggcaccuucauuggcuacaaggagcggccgcaggauguggaccaacgugaggcuccccucaacaacuucucuguggcgcagugccagcugaugaagacggagcggccccggcccaacaccuucaucauccgcugccugcaguggaccacugucaucgaacgcaccuuccauguggagacuccugaggagcgggaggaguggacaaccgccauccagacuguggcugacggccucaagaagcaggaggaggaggagauggacuuccggucgggcucacccagugacaacucaggggcugaagagauggaggugucccuggccaagcccaagcaccgcgugaccaugaacgaguuugaguaccugaagcugcugggcaagggcacuuucggcaaggugauccuggugaaggagaaggccacaggccgcuacuacgccaugaagauccucaagaaggaagucaucguggccaaggacgagguggcccacacacucaccgagaaccgcguccugcagaacuccaggcaccccuuccucacagcccugaaguacucuuuccagacccacgaccgccucugcuuugucauggaguacgccaacgggggcgagcuguucuuccaccugucccgggagcguguguucuccgaggaccgggcccgcuucuauggcgcugagauugugucagcccuggacuaccugcacucggagaagaacgugguguaccgggaccucaagcuggagaaccucaugcuggacaaggacgggcacauuaagaucacagacuucgggcugugcaaggaggggaucaaggacggugccaccaugaagaccuuuugcggcacaccugaguaccuggcccccgaggugcuggaggacaaugacuacggccgugcaguggacuggugggggcugggcguggucauguacgagaugaugugcggucgccugcccuucuacaaccaggaccaugagaagcuuuuugagcucauccucauggaggagauccgcuucccgcgcacgcuuggucccgaggccaaguccuugcuuucagggcugcucaagaaggaccccaagcagaggcuuggcgggggcuccgaggacgccaaggagaucaugcagcaucgcuucuuugccgguaucguguggcagcacguguacgagaagaagcucagcccacccuucaagccccaggucacgucggagacugacaccagguauuuugaugaggaguucacggcccagaugaucaccaucacaccaccugaccaagaugacagcauggaguguguggacagcgagcgcaggccccacuucccccaguucuccuacucggccagcggcacggccugaggcggcgguggacugcgcuggacgauagcuuggagggauggagaggcggccucgugccaugaucuguauuuaaugguuuuuauuucucgggugcauuugagagaagccacgcuguccucucgagcccagauggaaagacguuuuugugcugugggcagcacccucccccgcagcgggguagggaagaaaacuauccugcggguuuuaauuuauuucauccaguuuguucuccggguguggccucagcccucagaacaauccgauucacguagggaaauguuaaggacuucugcagcuaugcgcaauguggcauuggggggccgggcagguccugcccauguguccccucacucugucagccagccgcccugggcugucugucaccagcuaucugucaucucucuggggcccugggccucaguucaaccugguggcaccagaugcaaccucacuaugguaugcuggccagcacccucuccuggggguggcaggcacacagcagccccccagcacuaaggccgugucucugaggacgucaucggaggcugggccccugggaugggaccagggaugggggaugggccaggguuuacccagugggacagaggagcaagguuuaaauuuguuauuguguauuauguuguucaaaugcauuuuggggguuuuuaaucuuugugacaggaaagcccucccccuuccccuucugugucacaguucuuggugacugucccaccgggagccucccccucagaugaucucuccacgguagcacuugaccuuuucgacgcuuaaccuuuccgcugucgccccaggcccucccugacucccuguggggguggccaucccugggccccuccacgccuccuggccagacgcugccgcugccgcugcaccacggcguuuuuuuacaacauucaacuuuaguauuuuuacuauuauaauauaauauggaaccuucccuccaaauucuucaauaaaaguugcuuuucaaaaaaaaaaaaaaaaaaaaaa

SEQ ID NO: 1137 - RNA, 19 nt, Artificial Sequence
  Description of Artificial Sequence: Synthetic oligonucleotide
cggcaggaccgagcgcggc

SEQ ID NO: 1138 - RNA, 19 nt, Artificial Sequence
  Description of Artificial Sequence: Synthetic oligonucleotide
caggcggcuggcccagcgc

SEQ ID NO: 1139 - RNA, 19 nt, Artificial Sequence
  Description of Artificial Sequence: Synthetic oligonucleotide
cagccagcgcggcccgaag

SEQ ID NO: 1140 - RNA, 19 nt, Artificial Sequence
  Description of Artificial Sequence: Synthetic oligonucleotide
ggacgggagcaggcggccg

SEQ ID NO: 1141 - RNA, 19 nt, Artificial Sequence
  Description of Artificial Sequence: Synthetic oligonucleotide
gagcaccgagcgcugggca

SEQ ID NO: 1142 - RNA, 19 nt, Artificial Sequence
  Description of Artificial Sequence: Synthetic oligonucleotide
accgggcaccgagcggcgg

SEQ ID NO: 1143 - RNA, 19 nt, Artificial Sequence
  Description of Artificial Sequence: Synthetic oligonucleotide
gcggcacgcgaggcccggc

SEQ ID NO: 1144 - RNA, 19 nt, Artificial Sequence
  Description of Artificial Sequence: Synthetic oligonucleotide
ccccgagcagcgcccccgc

SEQ ID NO: 1145 - RNA, 19 nt, Artificial Sequence
  Description of Artificial Sequence: Synthetic oligonucleotide
cccgccgcggccuccagcc

SEQ ID NO: 1146 - RNA, 19 nt, Artificial Sequence
  Description of Artificial Sequence: Synthetic oligonucleotide
ccggccccgcccagcgccg

SEQ ID NO: 1147 - RNA, 19 nt, Artificial Sequence
  Description of Artificial Sequence: Synthetic oligonucleotide
ggcccgcggggaugcggag

SEQ ID NO: 1148 - RNA, 19 nt, Artificial Sequence
  Description of Artificial Sequence: Synthetic oligonucleotide
gcggcgggcgccggaggcc

SEQ ID NO: 1149 - RNA, 19 nt, Artificial Sequence
  Description of Artificial Sequence: Synthetic oligonucleotide
cgcggcccggcuaggcccg

SEQ ID NO: 1150 - RNA, 19 nt, Artificial Sequence
  Description of Artificial Sequence: Synthetic oligonucleotide
gcgcucgcgcccggacgcg

SEQ ID NO: 1151 - RNA, 19 nt, Artificial Sequence
  Description of Artificial Sequence: Synthetic oligonucleotide
ggcggcccgaggcuguggc

SEQ ID NO: 1152 - RNA, 19 nt, Artificial Sequence
  Description of Artificial Sequence: Synthetic oligonucleotide
ccaggccagcugggcucgg

SEQ ID NO: 1153 - RNA, 19 nt, Artificial Sequence
  Description of Artificial Sequence: Synthetic oligonucleotide
gggagcgccagccugagag

SEQ ID NO: 1154 - RNA, 19 nt, Artificial Sequence
  Description of Artificial Sequence: Synthetic oligonucleotide
ggagcgcgugagcgucgcg

SEQ ID NO: 1155 - RNA, 19 nt, Artificial Sequence
  Description of Artificial Sequence: Synthetic oligonucleotide
gggagccucgggcaccaug

SEQ ID NO: 1156 - RNA, 19 nt, Artificial Sequence
  Description of Artificial Sequence: Synthetic oligonucleotide
gagcgacguggcuauugug

SEQ ID NO: 1157 - RNA, 19 nt, Artificial Sequence
  Description of Artificial Sequence: Synthetic oligonucleotide
gaaggaggguuggcugcac

SEQ ID NO: 1158 - RNA, 19 nt, Artificial Sequence
  Description of Artificial Sequence: Synthetic oligonucleotide
caaacgaggggaguacauc

SEQ ID NO: 1159 - RNA, 19 nt, Artificial Sequence
  Description of Artificial Sequence: Synthetic oligonucleotide
caagaccuggcggccacgc

SEQ ID NO: 1160 - RNA, 19 nt, Artificial Sequence
  Description of Artificial Sequence: Synthetic oligonucleotide
cuacuuccuccucaagaau

SEQ ID NO: 1161 - RNA, 19 nt, Artificial Sequence
  Description of Artificial Sequence: Synthetic oligonucleotide
ugauggcaccuucauuggc

SEQ ID NO: 1162 - RNA, 19 nt, Artificial Sequence
  Description of Artificial Sequence: Synthetic oligonucleotide
cuacaaggagcggccgcag

SEQ ID NO: 1163 - RNA, 19 nt, Artificial Sequence
  Description of Artificial Sequence: Synthetic oligonucleotide
ggauguggaccaacgugag

SEQ ID NO: 1164 - RNA, 19 nt, Artificial Sequence
  Description of Artificial Sequence: Synthetic oligonucleotide
ggcuccccucaacaacuuc

SEQ ID NO: 1165 - RNA, 19 nt, Artificial Sequence
  Description of Artificial Sequence: Synthetic oligonucleotide
cucuguggcgcagugccag

SEQ ID NO: 1166 - RNA, 19 nt, Artificial Sequence
  Description of Artificial Sequence: Synthetic oligonucleotide
gcugaugaagacggagcgg

SEQ ID NO: 1167 - RNA, 19 nt, Artificial Sequence
  Description of Artificial Sequence: Synthetic oligonucleotide
gccccggcccaacaccuuc

SEQ ID NO: 1168 - RNA, 19 nt, Artificial Sequence
  Description of Artificial Sequence: Synthetic oligonucleotide
caucauccgcugccugcag

SEQ ID NO: 1169 - RNA, 19 nt, Artificial Sequence
  Description of Artificial Sequence: Synthetic oligonucleotide
guggaccacugucaucgaa

SEQ ID NO: 1170 - RNA, 19 nt, Artificial Sequence
  Description of Artificial Sequence: Synthetic oligonucleotide
acgcaccuuccauguggag

SEQ ID NO: 1171 - RNA, 19 nt, Artificial Sequence
  Description of Artificial Sequence: Synthetic oligonucleotide
gacuccugaggagcgggag

SEQ ID NO: 1172 - RNA, 19 nt, Artificial Sequence
  Description of Artificial Sequence: Synthetic oligonucleotide
ggaguggacaaccgccauc

SEQ ID NO: 1173 - RNA, 19 nt, Artificial Sequence
  Description of Artificial Sequence: Synthetic oligonucleotide
ccagacuguggcugacggc

SEQ ID NO: 1174 - RNA, 19 nt, Artificial Sequence
  Description of Artificial Sequence: Synthetic oligonucleotide
ccucaagaagcaggaggag

SEQ ID NO: 1175 - RNA, 19 nt, Artificial Sequence
  Description of Artificial Sequence: Synthetic oligonucleotide
ggaggagauggacuuccgg

SEQ ID NO: 1176 - RNA, 19 nt, Artificial Sequence
  Description of Artificial Sequence: Synthetic oligonucleotide
gucgggcucacccagugac

SEQ ID NO: 1177 - RNA, 19 nt, Artificial Sequence
  Description of Artificial Sequence: Synthetic oligonucleotide
caacucaggggcugaagag

SEQ ID NO: 1178 - RNA, 19 nt, Artificial Sequence
  Description of Artificial Sequence: Synthetic oligonucleotide
gauggaggugucccuggcc

SEQ ID NO: 1179 - RNA, 19 nt, Artificial Sequence
  Description of Artificial Sequence: Synthetic oligonucleotide
caagcccaagcaccgcgug

SEQ ID NO: 1180 - RNA, 19 nt, Artificial Sequence
  Description of Artificial Sequence: Synthetic oligonucleotide
gaccaugaacgaguuugag

SEQ ID NO: 1181 - RNA, 19 nt, Artificial Sequence
  Description of Artificial Sequence: Synthetic oligonucleotide
guaccugaagcugcugggc

SEQ ID NO: 1182 - RNA, 19 nt, Artificial Sequence
  Description of Artificial Sequence: Synthetic oligonucleotide
caagggcacuuucggcaag

SEQ ID NO: 1183 - RNA, 19 nt, Artificial Sequence
  Description of Artificial Sequence: Synthetic oligonucleotide
ggugauccuggugaaggag

SEQ ID NO: 1184 - RNA, 19 nt, Artificial Sequence
  Description of Artificial Sequence: Synthetic oligonucleotide
gaaggccacaggccgcuac

SEQ ID NO: 1185 - RNA, 19 nt, Artificial Sequence
  Description of Artificial Sequence: Synthetic oligonucleotide
cuacgccaugaagauccuc

SEQ ID NO: 1186 - RNA, 19 nt, Artificial Sequence
  Description of Artificial Sequence: Synthetic oligonucleotide
caagaaggaagucaucgug

SEQ ID NO: 1187 - RNA, 19 nt, Artificial Sequence
  Description of Artificial Sequence: Synthetic oligonucleotide
ggccaaggacgagguggcc

SEQ ID NO: 1188 - RNA, 19 nt, Artificial Sequence
  Description of Artificial Sequence: Synthetic oligonucleotide
ccacacacucaccgagaac

SEQ ID NO: 1189 - RNA, 19 nt, Artificial Sequence
  Description of Artificial Sequence: Synthetic oligonucleotide
ccgcguccugcagaacucc

SEQ ID NO: 1190 - RNA, 19 nt, Artificial Sequence
  Description of Artificial Sequence: Synthetic oligonucleotide
caggcaccccuuccucaca

SEQ ID NO: 1191 - RNA, 19 nt, Artificial Sequence
  Description of Artificial Sequence: Synthetic oligonucleotide
agcccugaaguacucuuuc

SEQ ID NO: 1192 - RNA, 19 nt, Artificial Sequence
  Description of Artificial Sequence: Synthetic oligonucleotide
ccagacccacgaccgccuc

SEQ ID NO: 1193 - RNA, 19 nt, Artificial Sequence
  Description of Artificial Sequence: Synthetic oligonucleotide
cugcuuugucauggaguac

SEQ ID NO: 1194 - RNA, 19 nt, Artificial Sequence
  Description of Artificial Sequence: Synthetic oligonucleotide
cgccaacgggggcgagcug

SEQ ID NO: 1195 - RNA, 19 nt, Artificial Sequence
  Description of Artificial Sequence: Synthetic oligonucleotide
guucuuccaccugucccgg

SEQ ID NO: 1196 - RNA, 19 nt, Artificial Sequence
  Description of Artificial Sequence: Synthetic oligonucleotide
ggagcguguguucuccgag

SEQ ID NO: 1197 - RNA, 19 nt, Artificial Sequence
  Description of Artificial Sequence: Synthetic oligonucleotide
ggaccgggcccgcuucuau

SEQ ID NO: 1198 - RNA, 19 nt, Artificial Sequence
  Description of Artificial Sequence: Synthetic oligonucleotide
uggcgcugagauuguguca

SEQ ID NO: 1199 - RNA, 19 nt, Artificial Sequence
  Description of Artificial Sequence: Synthetic oligonucleotide
agcccuggacuaccugcac

SEQ ID NO: 1200 - RNA, 19 nt, Artificial Sequence
  Description of Artificial Sequence: Synthetic oligonucleotide
cucggagaagaacguggug

SEQ ID NO: 1201 - RNA, 19 nt, Artificial Sequence
  Description of Artificial Sequence: Synthetic oligonucleotide
guaccgggaccucaagcug

SEQ ID NO: 1202 - RNA, 19 nt, Artificial Sequence
  Description of Artificial Sequence: Synthetic oligonucleotide
ggagaaccucaugcuggac

SEQ ID NO: 1203 - RNA, 19 nt, Artificial Sequence
  Description of Artificial Sequence: Synthetic oligonucleotide
caaggacgggcacauuaag

SEQ ID NO: 1204 - RNA, 19 nt, Artificial Sequence
  Description of Artificial Sequence: Synthetic oligonucleotide
gaucacagacuucgggcug

SEQ ID NO: 1205 - RNA, 19 nt, Artificial Sequence
  Description of Artificial Sequence: Synthetic oligonucleotide
gugcaaggaggggaucaag

SEQ ID NO: 1206 - RNA, 19 nt, Artificial Sequence
  Description of Artificial Sequence: Synthetic oligonucleotide
ggacggugccaccaugaag

SEQ ID NO: 1207 - RNA, 19 nt, Artificial Sequence
  Description of Artificial Sequence: Synthetic oligonucleotide
gaccuuuugcggcacaccu

SEQ ID NO: 1208 - RNA, 19 nt, Artificial Sequence
  Description of Artificial Sequence: Synthetic oligonucleotide
ugaguaccuggcccccgag

SEQ ID NO: 1209 - RNA, 19 nt, Artificial Sequence
  Description of Artificial Sequence: Synthetic oligonucleotide
ggugcuggaggacaaugac

SEQ ID NO: 1210 - RNA, 19 nt, Artificial Sequence
  Description of Artificial Sequence: Synthetic oligonucleotide
cuacggccgugcaguggac

SEQ ID NO: 1211 - RNA, 19 nt, Artificial Sequence
  Description of Artificial Sequence: Synthetic oligonucleotide
cuggugggggcugggcgug

SEQ ID NO: 1212 - RNA, 19 nt, Artificial Sequence
  Description of Artificial Sequence: Synthetic oligonucleotide
ggucauguacgagaugaug

SEQ ID NO: 1213 - RNA, 19 nt, Artificial Sequence
  Description of Artificial Sequence: Synthetic oligonucleotide
gugcggucgccugcccuuc

SEQ ID NO: 1214 - RNA, 19 nt, Artificial Sequence
  Description of Artificial Sequence: Synthetic oligonucleotide
cuacaaccaggaccaugag

SEQ ID NO: 1215 - RNA, 19 nt, Artificial Sequence
  Description of Artificial Sequence: Synthetic oligonucleotide
gaagcuuuuugagcucauc

SEQ ID NO: 1216 - RNA, 19 nt, Artificial Sequence
  Description of Artificial Sequence: Synthetic oligonucleotide
ccucauggaggagauccgc

SEQ ID NO: 1217 - RNA, 19 nt, Artificial Sequence
  Description of Artificial Sequence: Synthetic oligonucleotide
cuucccgcgcacgcuuggu

SEQ ID NO: 1218 - RNA, 19 nt, Artificial Sequence
  Description of Artificial Sequence: Synthetic oligonucleotide
ucccgaggccaaguccuug

SEQ ID NO: 1219 - RNA, 19 nt, Artificial Sequence
  Description of Artificial Sequence: Synthetic oligonucleotide
gcuuucagggcugcucaag

SEQ ID NO: 1220 - RNA, 19 nt, Artificial Sequence
  Description of Artificial Sequence: Synthetic oligonucleotide
gaaggaccccaagcagagg

SEQ ID NO: 1221 - RNA, 19 nt, Artificial Sequence
  Description of Artificial Sequence: Synthetic oligonucleotide
gcuuggcgggggcuccgag

SEQ ID NO: 1222 - RNA, 19 nt, Artificial Sequence
  Description of Artificial Sequence: Synthetic oligonucleotide
ggacgccaaggagaucaug

SEQ ID NO: 1223 - RNA, 19 nt, Artificial Sequence
  Description of Artificial Sequence: Synthetic oligonucleotide
gcagcaucgcuucuuugcc

SEQ ID NO: 1224 - RNA, 19 nt, Artificial Sequence
  Description of Artificial Sequence: Synthetic oligonucleotide
cgguaucguguggcagcac

SEQ ID NO: 1225 - RNA, 19 nt, Artificial Sequence
  Description of Artificial Sequence: Synthetic oligonucleotide
cguguacgagaagaagcuc

SEQ ID NO: 1226 - RNA, 19 nt, Artificial Sequence
  Description of Artificial Sequence: Synthetic oligonucleotide
cagcccacccuucaagccc

SEQ ID NO: 1227 - RNA, 19 nt, Artificial Sequence
  Description of Artificial Sequence: Synthetic oligonucleotide
ccaggucacgucggagacu

SEQ ID NO: 1228 - RNA, 19 nt, Artificial Sequence
  Description of Artificial Sequence: Synthetic oligonucleotide
ugacaccagguauuuugau

SEQ ID NO: 1229 - RNA, 19 nt, Artificial Sequence
  Description of Artificial Sequence: Synthetic oligonucleotide
ugaggaguucacggcccag

SEQ ID NO: 1230 - RNA, 19 nt, Artificial Sequence
  Description of Artificial Sequence: Synthetic oligonucleotide
gaugaucaccaucacacca

SEQ ID NO: 1231 - RNA, 19 nt, Artificial Sequence
  Description of Artificial Sequence: Synthetic oligonucleotide
accugaccaagaugacagc

SEQ ID NO: 1232 - RNA, 19 nt, Artificial Sequence
  Description of Artificial Sequence: Synthetic oligonucleotide
cauggaguguguggacagc

SEQ ID NO: 1233 - RNA, 19 nt, Artificial Sequence
  Description of Artificial Sequence: Synthetic oligonucleotide
cgagcgcaggccccacuuc

SEQ ID NO: 1234 - RNA, 19 nt, Artificial Sequence
  Description of Artificial Sequence: Synthetic oligonucleotide
cccccaguucuccuacucg

SEQ ID NO: 1235 - RNA, 19 nt, Artificial Sequence
  Description of Artificial Sequence: Synthetic oligonucleotide
ggccagcggcacggccuga

SEQ ID NO: 1236 - RNA, 19 nt, Artificial Sequence
  Description of Artificial Sequence: Synthetic oligonucleotide
aggcggcgguggacugcgc

SEQ ID NO: 1237 - RNA, 19 nt, Artificial Sequence
  Description of Artificial Sequence: Synthetic oligonucleotide
cuggacgauagcuuggagg

SEQ ID NO: 1238 - RNA, 19 nt, Artificial Sequence
  Description of Artificial Sequence: Synthetic oligonucleotide
ggauggagaggcggccucg

SEQ ID NO: 1239 - RNA, 19 nt, Artificial Sequence
  Description of Artificial Sequence: Synthetic oligonucleotide
gugccaugaucuguauuua

SEQ ID NO: 1240 - RNA, 19 nt, Artificial Sequence
  Description of Artificial Sequence: Synthetic oligonucleotide
aaugguuuuuauuucucgg

SEQ ID NO: 1241 - RNA, 19 nt, Artificial Sequence
  Description of Artificial Sequence: Synthetic oligonucleotide
ggugcauuugagagaagcc

SEQ ID NO: 1242 - RNA, 19 nt, Artificial Sequence
  Description of Artificial Sequence: Synthetic oligonucleotide
cacgcuguccucucgagcc

SEQ ID NO: 1243 - RNA, 19 nt, Artificial Sequence
  Description of Artificial Sequence: Synthetic oligonucleotide
ccagauggaaagacguuuu

SEQ ID NO: 1244 - RNA, 19 nt, Artificial Sequence
  Description of Artificial Sequence: Synthetic oligonucleotide
uugugcugugggcagcacc

SEQ ID NO: 1245 - RNA, 19 nt, Artificial Sequence
  Description of Artificial Sequence: Synthetic oligonucleotide
ccucccccgcagcggggua

SEQ ID NO: 1246 - RNA, 19 nt, Artificial Sequence
  Description of Artificial Sequence: Synthetic oligonucleotide
agggaagaaaacuauccug

SEQ ID NO: 1247 - RNA, 19 nt, Artificial Sequence
  Description of Artificial Sequence: Synthetic oligonucleotide
gcggguuuuaauuuauuuc

SEQ ID NO: 1248 - RNA, 19 nt, Artificial Sequence
  Description of Artificial Sequence: Synthetic oligonucleotide
cauccaguuuguucuccgg

SEQ ID NO: 1249 - RNA, 19 nt, Artificial Sequence
  Description of Artificial Sequence: Synthetic oligonucleotide
gguguggccucagcccuca

SEQ ID NO: 1250 - RNA, 19 nt, Artificial Sequence
  Description of Artificial Sequence: Synthetic oligonucleotide
agaacaauccgauucacgu

SEQ ID NO: 1251 - RNA, 19 nt, Artificial Sequence
  Description of Artificial Sequence: Synthetic oligonucleotide
uagggaaauguuaaggacu

SEQ ID NO: 1252 - RNA, 19 nt, Artificial Sequence
  Description of Artificial Sequence: Synthetic oligonucleotide
uucugcagcuaugcgcaau

SEQ ID NO: 1253 - RNA, 19 nt, Artificial Sequence
  Description of Artificial Sequence: Synthetic oligonucleotide
uguggcauuggggggccgg

SEQ ID NO: 1254 - RNA, 19 nt, Artificial Sequence
  Description of Artificial Sequence: Synthetic oligonucleotide
ggcagguccugcccaugug

SEQ ID NO: 1255 - RNA, 19 nt, Artificial Sequence
  Description of Artificial Sequence: Synthetic oligonucleotide
guccccucacucugucagc

SEQ ID NO: 1256 - RNA, 19 nt, Artificial Sequence
  Description of Artificial Sequence: Synthetic oligonucleotide
ccagccgcccugggcuguc

SEQ ID NO: 1257 - RNA, 19 nt, Artificial Sequence
  Description of Artificial Sequence: Synthetic oligonucleotide
cugucaccagcuaucuguc

SEQ ID NO: 1258 - RNA, 19 nt, Artificial Sequence
  Description of Artificial Sequence: Synthetic oligonucleotide
caucucucuggggcccugg

SEQ ID NO: 1259 - RNA, 19 nt, Artificial Sequence
  Description of Artificial Sequence: Synthetic oligonucleotide
ggccucaguucaaccuggu

SEQ ID NO: 1260 - RNA, 19 nt, Artificial Sequence
  Description of Artificial Sequence: Synthetic oligonucleotide
uggcaccagaugcaaccuc

SEQ ID NO: 1261 - RNA, 19 nt, Artificial Sequence
  Description of Artificial Sequence: Synthetic oligonucleotide
cacuaugguaugcuggcca

SEQ ID NO: 1262 - RNA, 19 nt, Artificial Sequence
  Description of Artificial Sequence: Synthetic oligonucleotide
agcacccucuccugggggu

SEQ ID NO: 1263 - RNA, 19 nt, Artificial Sequence
  Description of Artificial Sequence: Synthetic oligonucleotide
uggcaggcacacagcagcc

SEQ ID NO: 1264 - RNA, 19 nt, Artificial Sequence
  Description of Artificial Sequence: Synthetic oligonucleotide
cccccagcacuaaggccgu

SEQ ID NO: 1265 - RNA, 19 nt, Artificial Sequence
  Description of Artificial Sequence: Synthetic oligonucleotide
ugucucugaggacgucauc

SEQ ID NO: 1266 - RNA, 19 nt, Artificial Sequence
  Description of Artificial Sequence: Synthetic oligonucleotide
cggaggcugggccccuggg

SEQ ID NO: 1267 - RNA, 19 nt, Artificial Sequence
  Description of Artificial Sequence: Synthetic oligonucleotide
gaugggaccagggaugggg

SEQ ID NO: 1268 - RNA, 19 nt, Artificial Sequence
  Description of Artificial Sequence: Synthetic oligonucleotide
ggaugggccaggguuuacc

SEQ ID NO: 1269 - RNA, 19 nt, Artificial Sequence
  Description of Artificial Sequence: Synthetic oligonucleotide
ccagugggacagaggagca

SEQ ID NO: 1270 - RNA, 19 nt, Artificial Sequence
  Description of Artificial Sequence: Synthetic oligonucleotide
aagguuuaaauuuguuauu

SEQ ID NO: 1271 - RNA, 19 nt, Artificial Sequence
  Description of Artificial Sequence: Synthetic oligonucleotide
uguguauuauguuguucaa

SEQ ID NO: 1272 - RNA, 19 nt, Artificial Sequence
  Description of Artificial Sequence: Synthetic oligonucleotide
aaugcauuuuggggguuuu

SEQ ID NO: 1273 - RNA, 19 nt, Artificial Sequence
  Description of Artificial Sequence: Synthetic oligonucleotide
uuaaucuuugugacaggaa

SEQ ID NO: 1274 - RNA, 19 nt, Artificial Sequence
  Description of Artificial Sequence: Synthetic oligonucleotide
aagcccucccccuuccccu

SEQ ID NO: 1275 - RNA, 19 nt, Artificial Sequence
  Description of Artificial Sequence: Synthetic oligonucleotide
uucugugucacaguucuug

SEQ ID NO: 1276 - RNA, 19 nt, Artificial Sequence
  Description of Artificial Sequence: Synthetic oligonucleotide
ggugacugucccaccggga

SEQ ID NO: 1277 - RNA, 19 nt, Artificial Sequence
  Description of Artificial Sequence: Synthetic oligonucleotide
agccucccccucagaugau

SEQ ID NO: 1278 - RNA, 19 nt, Artificial Sequence
  Description of Artificial Sequence: Synthetic oligonucleotide
ucucuccacgguagcacuu

SEQ ID NO: 1279 - RNA, 19 nt, Artificial Sequence
  Description of Artificial Sequence: Synthetic oligonucleotide
ugaccuuuucgacgcuuaa

SEQ ID NO: 1280 - RNA, 19 nt, Artificial Sequence
  Description of Artificial Sequence: Synthetic oligonucleotide
accuuuccgcugucgcccc

SEQ ID NO: 1281 - RNA, 19 nt, Artificial Sequence
  Description of Artificial Sequence: Synthetic oligonucleotide
caggcccucccugacuccc

SEQ ID NO: 1282 - RNA, 19 nt, Artificial Sequence
  Description of Artificial Sequence: Synthetic oligonucleotide
cuguggggguggccauccc

SEQ ID NO: 1283 - RNA, 19 nt, Artificial Sequence
  Description of Artificial Sequence: Synthetic oligonucleotide
cugggccccuccacgccuc

SEQ ID NO: 1284 - RNA, 19 nt, Artificial Sequence
  Description of Artificial Sequence: Synthetic oligonucleotide
ccuggccagacgcugccgc

SEQ ID NO: 1285 - RNA, 19 nt, Artificial Sequence
  Description of Artificial Sequence: Synthetic oligonucleotide
cugccgcugcaccacggcg

SEQ ID NO: 1286 - RNA, 19 nt, Artificial Sequence
  Description of Artificial Sequence: Synthetic oligonucleotide
guuuuuuuacaacauucaa

SEQ ID NO: 1287 - RNA, 19 nt, Artificial Sequence
  Description of Artificial Sequence: Synthetic oligonucleotide
acuuuaguauuuuuacuau

SEQ ID NO: 1288 - RNA, 19 nt, Artificial Sequence
  Description of Artificial Sequence: Synthetic oligonucleotide
uuauaauauaauauggaac

SEQ ID NO: 1289 - RNA, 19 nt, Artificial Sequence
  Description of Artificial Sequence: Synthetic oligonucleotide
ccuucccuccaaauucuuc

SEQ ID NO: 1290 - RNA, 19 nt, Artificial Sequence
  Description of Artificial Sequence: Synthetic oligonucleotide
caauaaaaguugcuuuuca

SEQ ID NO: 1291 - RNA, 19 nt, Artificial Sequence
  Description of Artificial Sequence: Synthetic oligonucleotide
ggcggcccggggcuuaggg

SEQ ID NO: 1292 - RNA, 19 nt, Artificial Sequence
  Description of Artificial Sequence: Synthetic oligonucleotide
gaaggccgagccagccugg

SEQ ID NO: 1293 - RNA, 19 nt, Artificial Sequence
  Description of Artificial Sequence: Synthetic oligonucleotide
ggucaaagaagucaaaggg

SEQ ID NO: 1294 - RNA, 19 nt, Artificial Sequence
  Description of Artificial Sequence: Synthetic oligonucleotide
ggcugccuggaggaggcag

SEQ ID NO: 1295 - RNA, 19 nt, Artificial Sequence
  Description of Artificial Sequence: Synthetic oligonucleotide
gccugucagcuggugcauc

SEQ ID NO: 1296 - RNA, 19 nt, Artificial Sequence
  Description of Artificial Sequence: Synthetic oligonucleotide
cagaggcuguggccaggcc

SEQ ID NO: 1297 - RNA, 19 nt, Artificial Sequence
  Description of Artificial Sequence: Synthetic oligonucleotide
cagcugggcucggggagcg

SEQ ID NO: 1298 - RNA, 19 nt, Artificial Sequence
  Description of Artificial Sequence: Synthetic oligonucleotide
gccagccugagaggagcgc

SEQ ID NO: 1299 - RNA, 19 nt, Artificial Sequence
  Description of Artificial Sequence: Synthetic oligonucleotide
cgugagcgucgcgggagcc

SEQ ID NO: 1300 - RNA, 19 nt, Artificial Sequence
  Description of Artificial Sequence: Synthetic oligonucleotide
cucgggcaccaugagcgac

SEQ ID NO: 1301 - RNA, 19 nt, Artificial Sequence
  Description of Artificial Sequence: Synthetic oligonucleotide
cguggcuauugugaaggag

SEQ ID NO: 1302 - RNA, 19 nt, Artificial Sequence
  Description of Artificial Sequence: Synthetic oligonucleotide
ggguuggcugcacaaacga

SEQ ID NO: 1303 - RNA, 19 nt, Artificial Sequence
  Description of Artificial Sequence: Synthetic oligonucleotide
aggggaguacaucaagacc

SEQ ID NO: 1304 - RNA, 19 nt, Artificial Sequence
  Description of Artificial Sequence: Synthetic oligonucleotide
cuggcggccacgcuacuuc

SEQ ID NO: 1305 - RNA, 19 nt, Artificial Sequence
  Description of Artificial Sequence: Synthetic oligonucleotide
ccuccucaagaaugauggc

SEQ ID NO: 1306 - RNA, 19 nt, Artificial Sequence
  Description of Artificial Sequence: Synthetic oligonucleotide
caccuucauuggcuacaag

SEQ ID NO: 1307 - RNA, 19 nt, Artificial Sequence
  Description of Artificial Sequence: Synthetic oligonucleotide
ggagcggccgcaggaugug

SEQ ID NO: 1308 - RNA, 19 nt, Artificial Sequence
  Description of Artificial Sequence: Synthetic oligonucleotide
ggaccaacgugaggcuccc

SEQ ID NO: 1309 - RNA, 19 nt, Artificial Sequence
  Description of Artificial Sequence: Synthetic oligonucleotide
ccucaacaacuucucugug

SEQ ID NO: 1310 - RNA, 19 nt, Artificial Sequence
  Description of Artificial Sequence: Synthetic oligonucleotide
ggcgcagugccagcugaug

SEQ ID NO: 1311 - RNA, 19 nt, Artificial Sequence
  Description of Artificial Sequence: Synthetic oligonucleotide
gaagacggagcggccccgg

SEQ ID NO: 1312 - RNA, 19 nt, Artificial Sequence
  Description of Artificial Sequence: Synthetic oligonucleotide
gcccaacaccuucaucauc

SEQ ID NO: 1313 - RNA, 19 nt, Artificial Sequence
  Description of Artificial Sequence: Synthetic oligonucleotide
ccgcugccugcaguggacc

SEQ ID NO: 1314 - RNA, 19 nt, Artificial Sequence
  Description of Artificial Sequence: Synthetic oligonucleotide
cacugucaucgaacgcacc

SEQ ID NO: 1315 - RNA, 19 nt, Artificial Sequence
  Description of Artificial Sequence: Synthetic oligonucleotide
cuuccauguggagacuccu

SEQ ID NO: 1316 - RNA, 19 nt, Artificial Sequence
  Description of Artificial Sequence: Synthetic oligonucleotide
ugaggagcgggaggagugg

SEQ ID NO: 1317 - RNA, 19 nt, Artificial Sequence
  Description of Artificial Sequence: Synthetic oligonucleotide
gacaaccgccauccagacu

SEQ ID NO: 1318 - RNA, 19 nt, Artificial Sequence
  Description of Artificial Sequence: Synthetic oligonucleotide
uguggcugacggccucaag

SEQ ID NO: 1319 - RNA, 19 nt, Artificial Sequence
  Description of Artificial Sequence: Synthetic oligonucleotide
gaagcaggaggaggaggag

SEQ ID NO: 1320 - RNA, 19 nt, Artificial Sequence
  Description of Artificial Sequence: Synthetic oligonucleotide
gauggacuuccggucgggc

SEQ ID NO: 1321 - RNA, 19 nt, Artificial Sequence
  Description of Artificial Sequence: Synthetic oligonucleotide
cucacccagugacaacuca

SEQ ID NO: 1322 - RNA, 19 nt, Artificial Sequence
  Description of Artificial Sequence: Synthetic oligonucleotide
aggggcugaagagauggag

SEQ ID NO: 1323 - RNA, 19 nt, Artificial Sequence
  Description of Artificial Sequence: Synthetic oligonucleotide
ggugucccuggccaagccc

SEQ ID NO: 1324 - RNA, 19 nt, Artificial Sequence
  Description of Artificial Sequence: Synthetic oligonucleotide
caagcaccgcgugaccaug

SEQ ID NO: 1325 - RNA, 19 nt, Artificial Sequence
  Description of Artificial Sequence: Synthetic oligonucleotide
gaacgaguuugaguaccug

SEQ ID NO: 1326 - RNA, 19 nt, Artificial Sequence
  Description of Artificial Sequence: Synthetic oligonucleotide
gaagcugcugggcaagggc

SEQ ID NO: 1327 - RNA, 19 nt, Artificial Sequence
  Description of Artificial Sequence: Synthetic oligonucleotide
cacuuucggcaaggugauc

SEQ ID NO: 1328 - RNA, 19 nt, Artificial Sequence
  Description of Artificial Sequence: Synthetic oligonucleotide
ccuggugaaggagaaggcc

SEQ ID NO: 1329 - RNA, 19 nt, Artificial Sequence
  Description of Artificial Sequence: Synthetic oligonucleotide
cacaggccgcuacuacgcc

SEQ ID NO: 1330 - RNA, 19 nt, Artificial Sequence
  Description of Artificial Sequence: Synthetic oligonucleotide
caugaagauccucaagaag

SEQ ID NO: 1331 - RNA, 19 nt, Artificial Sequence
  Description of Artificial Sequence: Synthetic oligonucleotide
ggaagucaucguggccaag

SEQ ID NO: 1332 - RNA, 19 nt, Artificial Sequence
  Description of Artificial Sequence: Synthetic oligonucleotide
ggacgagguggcccacaca

SEQ ID NO: 1333 - RNA, 19 nt, Artificial Sequence
  Description of Artificial Sequence: Synthetic oligonucleotide
acucaccgagaaccgcguc

SEQ ID NO: 1334 - RNA, 19 nt, Artificial Sequence
  Description of Artificial Sequence: Synthetic oligonucleotide
ccugcagaacuccaggcac

SEQ ID NO: 1335 - RNA, 19 nt, Artificial Sequence
  Description of Artificial Sequence: Synthetic oligonucleotide
ccccuuccucacagcccug

SEQ ID NO: 1336 - RNA, 19 nt, Artificial Sequence
  Description of Artificial Sequence: Synthetic oligonucleotide
gaaguacucuuuccagacc

SEQ ID NO: 1337 - RNA, 19 nt, Artificial Sequence
  Description of Artificial Sequence: Synthetic oligonucleotide
ccacgaccgccucugcuuu

SEQ ID NO: 1338 - RNA, 19 nt, Artificial Sequence
  Description of Artificial Sequence: Synthetic oligonucleotide
ugucauggaguacgccaac

SEQ ID NO: 1339 - RNA, 19 nt, Artificial Sequence
  Description of Artificial Sequence: Synthetic oligonucleotide
cgggggcgagcuguucuuc

SEQ ID NO: 1340 - RNA, 19 nt, Artificial Sequence
  Description of Artificial Sequence: Synthetic oligonucleotide
ccaccugucccgggagcgu

SEQ ID NO: 1341 - RNA, 19 nt, Artificial Sequence
  Description of Artificial Sequence: Synthetic oligonucleotide
uguguucuccgaggaccgg

SEQ ID NO: 1342 - RNA, 19 nt, Artificial Sequence
  Description of Artificial Sequence: Synthetic oligonucleotide
ggcccgcuucuauggcgcu

SEQ ID NO: 1343 - RNA, 19 nt, Artificial Sequence
  Description of Artificial Sequence: Synthetic oligonucleotide
ugagauugugucagcccug

SEQ ID NO: 1344 - RNA, 19 nt, Artificial Sequence
  Description of Artificial Sequence: Synthetic oligonucleotide
ggacuaccugcacucggag

SEQ ID NO: 1345 - RNA, 19 nt, Artificial Sequence
  Description of Artificial Sequence: Synthetic oligonucleotide
gaagaacgugguguaccgg

SEQ ID NO: 1346 - RNA, 19 nt, Artificial Sequence
  Description of Artificial Sequence: Synthetic oligonucleotide
ggaccucaagcuggagaac

SEQ ID NO: 1347 - RNA, 19 nt, Artificial Sequence
  Description of Artificial Sequence: Synthetic oligonucleotide
ccucaugcuggacaaggac

SEQ ID NO: 1348 - RNA, 19 nt, Artificial Sequence
  Description of Artificial Sequence: Synthetic oligonucleotide
cgggcacauuaagaucaca

SEQ ID NO: 1349 - RNA, 19 nt, Artificial Sequence
  Description of Artificial Sequence: Synthetic oligonucleotide
agacuucgggcugugcaag

SEQ ID NO: 1350 - RNA, 19 nt, Artificial Sequence
  Description of Artificial Sequence: Synthetic oligonucleotide
ggaggggaucaaggacggu

SEQ ID NO: 1351 - RNA, 19 nt, Artificial Sequence
  Description of Artificial Sequence: Synthetic oligonucleotide
ugccaccaugaagaccuuu

SEQ ID NO: 1352 - RNA, 19 nt, Artificial Sequence
  Description of Artificial Sequence: Synthetic oligonucleotide
uugcggcacaccugaguac

SEQ ID NO: 1353 - RNA, 19 nt, Artificial Sequence
  Description of Artificial Sequence: Synthetic oligonucleotide
ccuggcccccgaggugcug

SEQ ID NO: 1354 - RNA, 19 nt, Artificial Sequence
  Description of Artificial Sequence: Synthetic oligonucleotide
ggaggacaaugacuacggc

SEQ ID NO: 1355 - RNA, 19 nt, Artificial Sequence
  Description of Artificial Sequence: Synthetic oligonucleotide
ccgugcaguggacuggugg

SEQ ID NO: 1356 - RNA, 19 nt, Artificial Sequence
  Description of Artificial Sequence: Synthetic oligonucleotide
ggggcugggcguggucaug

SEQ ID NO: 1357 - RNA, 19 nt, Artificial Sequence
  Description of Artificial Sequence: Synthetic oligonucleotide
guacgagaugaugugcggu

SEQ ID NO: 1358 - RNA, 19 nt, Artificial Sequence
  Description of Artificial Sequence: Synthetic oligonucleotide
ucgccugcccuucuacaac

SEQ ID NO: 1359 - RNA, 19 nt, Artificial Sequence
  Description of Artificial Sequence: Synthetic oligonucleotide
ccaggaccaugagaagcuu

SEQ ID NO: 1360 - RNA, 19 nt, Artificial Sequence
  Description of Artificial Sequence: Synthetic oligonucleotide
uuuugagcucauccucaug

SEQ ID NO: 1361 - RNA, 19 nt, Artificial Sequence
  Description of Artificial Sequence: Synthetic oligonucleotide
ggaggagauccgcuucccg

SEQ ID NO: 1362 - RNA, 19 nt, Artificial Sequence
  Description of Artificial Sequence: Synthetic oligonucleotide
gcgcacgcuuggucccgag

SEQ ID NO: 1363 - RNA, 19 nt, Artificial Sequence
  Description of Artificial Sequence: Synthetic oligonucleotide
ggccaaguccuugcuuuca

SEQ ID NO: 1364 - RNA, 19 nt, Artificial Sequence
  Description of Artificial Sequence: Synthetic oligonucleotide
agggcugcucaagaaggac

SEQ ID NO: 1365 - RNA, 19 nt, Artificial Sequence
  Description of Artificial Sequence: Synthetic oligonucleotide
ccccaagcagaggcuuggc

SEQ ID NO: 1366 - RNA, 19 nt, Artificial Sequence
  Description of Artificial Sequence: Synthetic oligonucleotide
cgggggcuccgaggacgcc

SEQ ID NO: 1367 - RNA, 19 nt, Artificial Sequence
  Description of Artificial Sequence: Synthetic oligonucleotide
caaggagaucaugcagcau

SEQ ID NO: 1368 - RNA, 19 nt, Artificial Sequence
  Description of Artificial Sequence: Synthetic oligonucleotide
ucgcuucuuugccgguauc

SEQ ID NO: 1369 - RNA, 19 nt, Artificial Sequence
  Description of Artificial Sequence: Synthetic oligonucleotide
cguguggcagcacguguac

SEQ ID NO: 1370 - RNA, 19 nt, Artificial Sequence
  Description of Artificial Sequence: Synthetic oligonucleotide
cgagaagaagcucagccca

SEQ ID NO: 1371 - RNA, 19 nt, Artificial Sequence
  Description of Artificial Sequence: Synthetic oligonucleotide
acccuucaagccccagguc

SEQ ID NO: 1372 - RNA, 19 nt, Artificial Sequence
  Description of Artificial Sequence: Synthetic oligonucleotide
cacgucggagacugacacc

SEQ ID NO: 1373 - RNA, 19 nt, Artificial Sequence
  Description of Artificial Sequence: Synthetic oligonucleotide
cagguauuuugaugaggag

SEQ ID NO: 1374 - RNA, 19 nt, Artificial Sequence
  Description of Artificial Sequence: Synthetic oligonucleotide
guucacggcccagaugauc

SEQ ID NO: 1375 - RNA, 19 nt, Artificial Sequence
  Description of Artificial Sequence: Synthetic oligonucleotide
caccaucacaccaccugac

SEQ ID NO: 1376 - RNA, 19 nt, Artificial Sequence
  Description of Artificial Sequence: Synthetic oligonucleotide
ccaagaugacagcauggag

SEQ ID NO: 1377 - RNA, 19 nt, Artificial Sequence
  Description of Artificial Sequence: Synthetic oligonucleotide
guguguggacagcgagcgc

SEQ ID NO: 1378 - RNA, 19 nt, Artificial Sequence
  Description of Artificial Sequence: Synthetic oligonucleotide
caggccccacuucccccag

SEQ ID NO: 1379 - RNA, 19 nt, Artificial Sequence
  Description of Artificial Sequence: Synthetic oligonucleotide
guucuccuacucggccagc

SEQ ID NO: 1380 - RNA, 19 nt, Artificial Sequence
  Description of Artificial Sequence: Synthetic oligonucleotide
cggcacggccugaggcggc

SEQ ID NO: 1381 - RNA, 19 nt, Artificial Sequence
  Description of Artificial Sequence: Synthetic oligonucleotide
cgguggacugcgcuggacg

SEQ ID NO: 1382 - RNA, 19 nt, Artificial Sequence
  Description of Artificial Sequence: Synthetic oligonucleotide
gauagcuuggagggaugga

SEQ ID NO: 1383 - RNA, 19 nt, Artificial Sequence
  Description of Artificial Sequence: Synthetic oligonucleotide
agaggcggccucgugccau

SEQ ID NO: 1384 - RNA, 19 nt, Artificial Sequence
  Description of Artificial Sequence: Synthetic oligonucleotide
ugaucuguauuuaaugguu

SEQ ID NO: 1385 - RNA, 19 nt, Artificial Sequence
  Description of Artificial Sequence: Synthetic oligonucleotide
uuuuauuucucgggugcau

SEQ ID NO: 1386 - RNA, 19 nt, Artificial Sequence
  Description of Artificial Sequence: Synthetic oligonucleotide
uuugagagaagccacgcug

SEQ ID NO: 1387 - RNA, 19 nt, Artificial Sequence
  Description of Artificial Sequence: Synthetic oligonucleotide
guccucucgagcccagaug

SEQ ID NO: 1388 - RNA, 19 nt, Artificial Sequence
  Description of Artificial Sequence: Synthetic oligonucleotide
ggaaagacguuuuugugcu

SEQ ID NO: 1389 - RNA, 19 nt, Artificial Sequence
  Description of Artificial Sequence: Synthetic oligonucleotide
ugugggcagcacccucccc

SEQ ID NO: 1390 - RNA, 19 nt, Artificial Sequence
  Description of Artificial Sequence: Synthetic oligonucleotide
ccgcagcgggguagggaag

SEQ ID NO: 1391 - RNA, 19 nt, Artificial Sequence
  Description of Artificial Sequence: Synthetic oligonucleotide
gaaaacuauccugcggguu

SEQ ID NO: 1392 - RNA, 19 nt, Artificial Sequence
  Description of Artificial Sequence: Synthetic oligonucleotide
uuuaauuuauuucauccag

SEQ ID NO: 1393 - RNA, 19 nt, Artificial Sequence
  Description of Artificial Sequence: Synthetic oligonucleotide
guuuguucuccgggugugg

SEQ ID NO: 1394 - RNA, 19 nt, Artificial Sequence
  Description of Artificial Sequence: Synthetic oligonucleotide
gccucagcccucagaacaa

SEQ ID NO: 1395 - RNA, 19 nt, Artificial Sequence
  Description of Artificial Sequence: Synthetic oligonucleotide
auccgauucacguagggaa

SEQ ID NO: 1396 - RNA, 19 nt, Artificial Sequence
  Description of Artificial Sequence: Synthetic oligonucleotide
aauguuaaggacuucugca

SEQ ID NO: 1397 - RNA, 19 nt, Artificial Sequence
  Description of Artificial Sequence: Synthetic oligonucleotide
agcuaugcgcaauguggca

SEQ ID NO: 1398 - RNA, 19 nt, Artificial Sequence
  Description of Artificial Sequence: Synthetic oligonucleotide
auuggggggccgggcaggu

SEQ ID NO: 1399 - RNA, 19 nt, Artificial Sequence
  Description of Artificial Sequence: Synthetic oligonucleotide
uccugcccauguguccccu

SEQ ID NO: 1400 - RNA, 19 nt, Artificial Sequence
  Description of Artificial Sequence: Synthetic oligonucleotide
ucacucugucagccagccg

SEQ ID NO: 1401 - RNA, 19 nt, Artificial Sequence
  Description of Artificial Sequence: Synthetic oligonucleotide
gcccugggcugucugucac

SEQ ID NO: 1402 - RNA, 19 nt, Artificial Sequence
  Description of Artificial Sequence: Synthetic oligonucleotide
ccagcuaucugucaucucu

SEQ ID NO: 1403 - RNA, 19 nt, Artificial Sequence
  Description of Artificial Sequence: Synthetic oligonucleotide
ucuggggcccugggccuca

SEQ ID NO: 1404 - RNA, 19 nt, Artificial Sequence
  Description of Artificial Sequence: Synthetic oligonucleotide
aguucaaccugguggcacc

SEQ ID NO: 1405 - RNA, 19 nt, Artificial Sequence
  Description of Artificial Sequence: Synthetic oligonucleotide
cagaugcaaccucacuaug

SEQ ID NO: 1406 - RNA, 19 nt, Artificial Sequence
  Description of Artificial Sequence: Synthetic oligonucleotide
gguaugcuggccagcaccc

SEQ ID NO: 1407 - RNA, 19 nt, Artificial Sequence
  Description of Artificial Sequence: Synthetic oligonucleotide
cucuccuggggguggcagg

SEQ ID NO: 1408 - RNA, 19 nt, Artificial Sequence
  Description of Artificial Sequence: Synthetic oligonucleotide
gcacacagcagccccccag

SEQ ID NO: 1409 - RNA, 19 nt, Artificial Sequence
  Description of Artificial Sequence: Synthetic oligonucleotide
gcacuaaggccgugucucu

SEQ ID NO: 1410 - RNA, 19 nt, Artificial Sequence
  Description of Artificial Sequence: Synthetic oligonucleotide
ugaggacgucaucggaggc

SEQ ID NO: 1411 - RNA, 19 nt, Artificial Sequence
  Description of Artificial Sequence: Synthetic oligonucleotide
cugggccccugggauggga

SEQ ID NO: 1412 - RNA, 19 nt, Artificial Sequence
  Description of Artificial Sequence: Synthetic oligonucleotide
accagggaugggggauggg

SEQ ID NO: 1413 - RNA, 19 nt, Artificial Sequence
  Description of Artificial Sequence: Synthetic oligonucleotide
gccaggguuuacccagugg

SEQ ID NO: 1414 - RNA, 19 nt, Artificial Sequence
  Description of Artificial Sequence: Synthetic oligonucleotide
ggacagaggagcaagguuu

SEQ ID NO: 1415 - RNA, 19 nt, Artificial Sequence
  Description of Artificial Sequence: Synthetic oligonucleotide
uaaauuuguuauuguguau

SEQ ID NO: 1416 - RNA, 19 nt, Artificial Sequence
  Description of Artificial Sequence: Synthetic oligonucleotide
uuauguuguucaaaugcau

SEQ ID NO: 1417 - RNA, 19 nt, Artificial Sequence
  Description of Artificial Sequence: Synthetic oligonucleotide
uuuuggggguuuuuaaucu

SEQ ID NO: 1418 - RNA, 19 nt, Artificial Sequence
  Description of Artificial Sequence: Synthetic oligonucleotide
uuugugacaggaaagcccu

SEQ ID NO: 1419 - RNA, 19 nt, Artificial Sequence
  Description of Artificial Sequence: Synthetic oligonucleotide
ucccccuuccccuucugug

SEQ ID NO: 1420 - RNA, 19 nt, Artificial Sequence
  Description of Artificial Sequence: Synthetic oligonucleotide
gucacaguucuuggugacu

SEQ ID NO: 1421 - RNA, 19 nt, Artificial Sequence
  Description of Artificial Sequence: Synthetic oligonucleotide
ugucccaccgggagccucc

SEQ ID NO: 1422 - RNA, 19 nt, Artificial Sequence
  Description of Artificial Sequence: Synthetic oligonucleotide
ccccucagaugaucucucc

SEQ ID NO: 1423 - RNA, 19 nt, Artificial Sequence
  Description of Artificial Sequence: Synthetic oligonucleotide
cacgguagcacuugaccuu

SEQ ID NO: 1424 - RNA, 19 nt, Artificial Sequence
  Description of Artificial Sequence: Synthetic oligonucleotide
uuucgacgcuuaaccuuuc

SEQ ID NO: 1425 - RNA, 19 nt, Artificial Sequence
  Description of Artificial Sequence: Synthetic oligonucleotide
ccgcugucgccccaggccc

SEQ ID NO: 1426 - RNA, 19 nt, Artificial Sequence
  Description of Artificial Sequence: Synthetic oligonucleotide
cucccugacucccuguggg

SEQ ID NO: 1427 - RNA, 19 nt, Artificial Sequence
  Description of Artificial Sequence: Synthetic oligonucleotide
ggguggccaucccugggcc

SEQ ID NO: 1428 - RNA, 19 nt, Artificial Sequence
  Description of Artificial Sequence: Synthetic oligonucleotide
cccuccacgccuccuggcc

SEQ ID NO: 1429 - RNA, 19 nt, Artificial Sequence
  Description of Artificial Sequence: Synthetic oligonucleotide
cagacgcugccgcugccgc

SEQ ID NO: 1430 - RNA, 19 nt, Artificial Sequence
  Description of Artificial Sequence: Synthetic oligonucleotide
cugcaccacggcguuuuuu

SEQ ID NO: 1431 - RNA, 19 nt, Artificial Sequence
  Description of Artificial Sequence: Synthetic oligonucleotide
uuacaacauucaacuuuag

SEQ ID NO: 1432 - RNA, 19 nt, Artificial Sequence
  Description of Artificial Sequence: Synthetic oligonucleotide
guauuuuuacuauuauaau

SEQ ID NO: 1433 - RNA, 19 nt, Artificial Sequence
  Description of Artificial Sequence: Synthetic oligonucleotide
uauaauauggaaccuuccc

SEQ ID NO: 1434 - RNA, 19 nt, Artificial Sequence
  Description of Artificial Sequence: Synthetic oligonucleotide
cuccaaauucuucaauaaa

SEQ ID NO: 1435 - RNA, 19 nt, Artificial Sequence
  Description of Artificial Sequence: Synthetic oligonucleotide
aaguugcuuuucaaaaaaa

SEQ ID NO: 1436 - RNA, 19 nt, Artificial Sequence
  Description of Artificial Sequence: Synthetic oligonucleotide
uaauuaugggucuguaacc

SEQ ID NO: 1437 - RNA, 19 nt, Artificial Sequence
  Description of Artificial Sequence: Synthetic oligonucleotide
cacccuggacugggugcuc

SEQ ID NO: 1438 - RNA, 19 nt, Artificial Sequence
  Description of Artificial Sequence: Synthetic oligonucleotide
ccucacugacggacuuguc

SEQ ID NO: 1439 - RNA, 19 nt, Artificial Sequence
  Description of Artificial Sequence: Synthetic oligonucleotide
cugaaccucucuuugucuc

SEQ ID NO: 1440 - RNA, 19 nt, Artificial Sequence
  Description of Artificial Sequence: Synthetic oligonucleotide
ccagcgcccagcacugggc

SEQ ID NO: 1441 - RNA, 19 nt, Artificial Sequence
  Description of Artificial Sequence: Synthetic oligonucleotide
ccuggcaaaaccugagacg

SEQ ID NO: 1442 - RNA, 19 nt, Artificial Sequence
  Description of Artificial Sequence: Synthetic oligonucleotide
gcccgguacauguuggcca

SEQ ID NO: 1443 - RNA, 19 nt, Artificial Sequence
  Description of Artificial Sequence: Synthetic oligonucleotide
aaaugaaugaaccagauuc

SEQ ID NO: 1444 - RNA, 19 nt, Artificial Sequence
  Description of Artificial Sequence: Synthetic oligonucleotide
cagaccggcaggggcgcug

SEQ ID NO: 1445 - RNA, 19 nt, Artificial Sequence
  Description of Artificial Sequence: Synthetic oligonucleotide
gugguuuaggaggggccug

SEQ ID NO: 1446 - RNA, 19 nt, Artificial Sequence
  Description of Artificial Sequence: Synthetic oligonucleotide
gggguuucucccaggaggu

SEQ ID NO: 1447 - RNA, 19 nt, Artificial Sequence
  Description of Artificial Sequence: Synthetic oligonucleotide
uuuuugggcuugcgcugga

SEQ ID NO: 1448 - RNA, 19 nt, Artificial Sequence
  Description of Artificial Sequence: Synthetic oligonucleotide
agggcucuggacucccguu

SEQ ID NO: 1449 - RNA, 19 nt, Artificial Sequence
  Description of Artificial Sequence: Synthetic oligonucleotide
uugcgccaguggccugcau

SEQ ID NO: 1450 - RNA, 19 nt, Artificial Sequence
  Description of Artificial Sequence: Synthetic oligonucleotide
uccugguccugucuuccuc

SEQ ID NO: 1451 - RNA, 19 nt, Artificial Sequence
  Description of Artificial Sequence: Synthetic oligonucleotide
cauguuugaauuucuuugc

SEQ ID NO: 1452 - RNA, 19 nt, Artificial Sequence
  Description of Artificial Sequence: Synthetic oligonucleotide
cuuuccuagucuggggagc

SEQ ID NO: 1453 - RNA, 19 nt, Artificial Sequence
  Description of Artificial Sequence: Synthetic oligonucleotide
cagggaggagcccugugcc

SEQ ID NO: 1454 - RNA, 19 nt, Artificial Sequence
  Description of Artificial Sequence: Synthetic oligonucleotide
ccugucccaggauccaugg

SEQ ID NO: 1455 - RNA, 19 nt, Artificial Sequence
  Description of Artificial Sequence: Synthetic oligonucleotide
gguaggaacaccauggaca

SEQ ID NO: 1456 - RNA, 19 nt, Artificial Sequence
  Description of Artificial Sequence: Synthetic oligonucleotide
agggagagcaaacggggcc

SEQ ID NO: 1457 - RNA, 19 nt, Artificial Sequence
  Description of Artificial Sequence: Synthetic oligonucleotide
caucugucaccaggggcuu

SEQ ID NO: 1458 - RNA, 19 nt, Artificial Sequence
  Description of Artificial Sequence: Synthetic oligonucleotide
uagggaaggccgagccagc

SEQ ID NO: 1459 - RNA, 19 nt, Artificial Sequence
  Description of Artificial Sequence: Synthetic oligonucleotide
ccugggucaaagaagucaa

SEQ ID NO: 1460 - RNA, 19 nt, Artificial Sequence
  Description of Artificial Sequence: Synthetic oligonucleotide
aaggggcugccuggaggag

SEQ ID NO: 1461 - RNA, 19 nt, Artificial Sequence
  Description of Artificial Sequence: Synthetic oligonucleotide
ggcagccugucagcuggug

SEQ ID NO: 1462 - RNA, 19 nt, Artificial Sequence
  Description of Artificial Sequence: Synthetic oligonucleotide
gcaucagaggcuguggcca

SEQ ID NO: 1463 - RNA, 19 nt, Artificial Sequence
  Description of Artificial Sequence: Synthetic oligonucleotide
aggccagcugggcucgggg

SEQ ID NO: 1464 - RNA, 19 nt, Artificial Sequence
  Description of Artificial Sequence: Synthetic oligonucleotide
gagcgccagccugagagga

SEQ ID NO: 1465 - RNA, 19 nt, Artificial Sequence
  Description of Artificial Sequence: Synthetic oligonucleotide
agcgcgugagcgucgcggg

SEQ ID NO: 1466 - RNA, 19 nt, Artificial Sequence
  Description of Artificial Sequence: Synthetic oligonucleotide
gagccucgggcaccaugag

SEQ ID NO: 1467 - RNA, 19 nt, Artificial Sequence
  Description of Artificial Sequence: Synthetic oligonucleotide
gcgacguggcuauugugaa

SEQ ID NO: 1468 - RNA, 19 nt, Artificial Sequence
  Description of Artificial Sequence: Synthetic oligonucleotide
aggaggguuggcugcacaa

SEQ ID NO: 1469 - RNA, 19 nt, Artificial Sequence
  Description of Artificial Sequence: Synthetic oligonucleotide
aacgaggggaguacaucaa

SEQ ID NO: 1470 - RNA, 19 nt, Artificial Sequence
  Description of Artificial Sequence: Synthetic oligonucleotide
agaccuggcggccacgcua

SEQ ID NO: 1471 - RNA, 19 nt, Artificial Sequence
  Description of Artificial Sequence: Synthetic oligonucleotide
acuuccuccucaagaauga

SEQ ID NO: 1472 - RNA, 19 nt, Artificial Sequence
  Description of Artificial Sequence: Synthetic oligonucleotide
auggcaccuucauuggcua

SEQ ID NO: 1473 - RNA, 19 nt, Artificial Sequence
  Description of Artificial Sequence: Synthetic oligonucleotide
acaaggagcggccgcagga

SEQ ID NO: 1474 - RNA, 19 nt, Artificial Sequence
  Description of Artificial Sequence: Synthetic oligonucleotide
auguggaccaacgugaggc

SEQ ID NO: 1475 - RNA, 19 nt, Artificial Sequence
  Description of Artificial Sequence: Synthetic oligonucleotide
cuccccucaacaacuucuc

SEQ ID NO: 1476 - RNA, 19 nt, Artificial Sequence
  Description of Artificial Sequence: Synthetic oligonucleotide
cuguggcgcagugccagcu

SEQ ID NO: 1477 - RNA, 19 nt, Artificial Sequence
  Description of Artificial Sequence: Synthetic oligonucleotide
ugaugaagacggagcggcc

SEQ ID NO: 1478 - RNA, 19 nt, Artificial Sequence
  Description of Artificial Sequence: Synthetic oligonucleotide
cccggcccaacaccuucau

SEQ ID NO: 1479 - RNA, 19 nt, Artificial Sequence
  Description of Artificial Sequence: Synthetic oligonucleotide
ucauccgcugccugcagug

SEQ ID NO: 1480 - RNA, 19 nt, Artificial Sequence
  Description of Artificial Sequence: Synthetic oligonucleotide
ggaccacugucaucgaacg

SEQ ID NO: 1481 - RNA, 19 nt, Artificial Sequence
  Description of Artificial Sequence: Synthetic oligonucleotide
gcaccuuccauguggagac

SEQ ID NO: 1482 - RNA, 19 nt, Artificial Sequence
  Description of Artificial Sequence: Synthetic oligonucleotide
cuccugaggagcgggagga

SEQ ID NO: 1483 - RNA, 19 nt, Artificial Sequence
  Description of Artificial Sequence: Synthetic oligonucleotide
aguggacaaccgccaucca

SEQ ID NO: 1484 - RNA, 19 nt, Artificial Sequence
  Description of Artificial Sequence: Synthetic oligonucleotide
agacuguggcugacggccu

SEQ ID NO: 1485 - RNA, 19 nt, Artificial Sequence
  Description of Artificial Sequence: Synthetic oligonucleotide
ucaagaagcaggaggagga

SEQ ID NO: 1486 - RNA, 19 nt, Artificial Sequence
  Description of Artificial Sequence: Synthetic oligonucleotide
aggagauggacuuccgguc

SEQ ID NO: 1487 - RNA, 19 nt, Artificial Sequence
  Description of Artificial Sequence: Synthetic oligonucleotide
cgggcucacccagugacaa

SEQ ID NO: 1488 - RNA, 19 nt, Artificial Sequence
  Description of Artificial Sequence: Synthetic oligonucleotide
acucaggggcugaagagau

SEQ ID NO: 1489 - RNA, 19 nt, Artificial Sequence
  Description of Artificial Sequence: Synthetic oligonucleotide
uggaggugucccuggccaa

SEQ ID NO: 1490 - RNA, 19 nt, Artificial Sequence
  Description of Artificial Sequence: Synthetic oligonucleotide
agcccaagcaccgcgugac

SEQ ID NO: 1491 - RNA, 19 nt, Artificial Sequence
  Description of Artificial Sequence: Synthetic oligonucleotide
ccaugaacgaguuugagua

SEQ ID NO: 1492 - RNA, 19 nt, Artificial Sequence
  Description of Artificial Sequence: Synthetic oligonucleotide
accugaagcugcugggcaa

SEQ ID NO: 1493 - RNA, 19 nt, Artificial Sequence
  Description of Artificial Sequence: Synthetic oligonucleotide
agggcacuuucggcaaggu

SEQ ID NO: 1494 - RNA, 19 nt, Artificial Sequence
  Description of Artificial Sequence: Synthetic oligonucleotide
ugauccuggugaaggagaa

SEQ ID NO: 1495 - RNA, 19 nt, Artificial Sequence
  Description of Artificial Sequence: Synthetic oligonucleotide
aggccacaggccgcuacua

SEQ ID NO: 1496 - RNA, 19 nt, Artificial Sequence
  Description of Artificial Sequence: Synthetic oligonucleotide
acgccaugaagauccucaa

SEQ ID NO: 1497 - RNA, 19 nt, Artificial Sequence
  Description of Artificial Sequence: Synthetic oligonucleotide
agaaggaagucaucguggc

SEQ ID NO: 1498 - RNA, 19 nt, Artificial Sequence
  Description of Artificial Sequence: Synthetic oligonucleotide
ccaaggacgagguggccca

SEQ ID NO: 1499 - RNA, 19 nt, Artificial Sequence
  Description of Artificial Sequence: Synthetic oligonucleotide
acacacucaccgagaaccg

SEQ ID NO: 1500 - RNA, 19 nt, Artificial Sequence
  Description of Artificial Sequence: Synthetic oligonucleotide
gcguccugcagaacuccag

SEQ ID NO: 1501 - RNA, 19 nt, Artificial Sequence
  Description of Artificial Sequence: Synthetic oligonucleotide
ggcaccccuuccucacagc

SEQ ID NO: 1502 - RNA, 19 nt, Artificial Sequence
  Description of Artificial Sequence: Synthetic oligonucleotide
cccugaaguacucuuucca

SEQ ID NO: 1503 - RNA, 19 nt, Artificial Sequence
  Description of Artificial Sequence: Synthetic oligonucleotide
agacccacgaccgccucug

SEQ ID NO: 1504 - RNA, 19 nt, Artificial Sequence
  Description of Artificial Sequence: Synthetic oligonucleotide
gcuuugucauggaguacgc

SEQ ID NO: 1505 - RNA, 19 nt, Artificial Sequence
  Description of Artificial Sequence: Synthetic oligonucleotide
ccaacgggggcgagcuguu

SEQ ID NO: 1506 - RNA, 19 nt, Artificial Sequence
  Description of Artificial Sequence: Synthetic oligonucleotide
ucuuccaccugucccggga

SEQ ID NO: 1507 - RNA, 19 nt, Artificial Sequence
  Description of Artificial Sequence: Synthetic oligonucleotide
agcguguguucuccgagga

SEQ ID NO: 1508 - RNA, 19 nt, Artificial Sequence
  Description of Artificial Sequence: Synthetic oligonucleotide
accgggcccgcuucuaugg

SEQ ID NO: 1509 - RNA, 19 nt, Artificial Sequence
  Description of Artificial Sequence: Synthetic oligonucleotide
gcgcugagauugugucagc

SEQ ID NO: 1510 - RNA, 19 nt, Artificial Sequence
  Description of Artificial Sequence: Synthetic oligonucleotide
cccuggacuaccugcacuc

SEQ ID NO: 1511 - RNA, 19 nt, Artificial Sequence
  Description of Artificial Sequence: Synthetic oligonucleotide
cggagaagaacguggugua

SEQ ID NO: 1512 - RNA, 19 nt, Artificial Sequence
  Description of Artificial Sequence: Synthetic oligonucleotide
accgggaccucaagcugga

SEQ ID NO: 1513 - RNA, 19 nt, Artificial Sequence
  Description of Artificial Sequence: Synthetic oligonucleotide
agaaccucaugcuggacaa

SEQ ID NO: 1514 - RNA, 19 nt, Artificial Sequence
  Description of Artificial Sequence: Synthetic oligonucleotide
aggacgggcacauuaagau

SEQ ID NO: 1515 - RNA, 19 nt, Artificial Sequence
  Description of Artificial Sequence: Synthetic oligonucleotide
ucacagacuucgggcugug

SEQ ID NO: 1516 - RNA, 19 nt, Artificial Sequence
  Description of Artificial Sequence: Synthetic oligonucleotide
gcaaggaggggaucaagga

SEQ ID NO: 1517 - RNA, 19 nt, Artificial Sequence
  Description of Artificial Sequence: Synthetic oligonucleotide
acggugccaccaugaagac

SEQ ID NO: 1518 - RNA, 19 nt, Artificial Sequence
  Description of Artificial Sequence: Synthetic oligonucleotide
ccuuuugcggcacaccuga

SEQ ID NO: 1519 - RNA, 19 nt, Artificial Sequence
  Description of Artificial Sequence: Synthetic oligonucleotide
aguaccuggcccccgaggu

SEQ ID NO: 1520 - RNA, 19 nt, Artificial Sequence
  Description of Artificial Sequence: Synthetic oligonucleotide
ugcuggaggacaaugacua

SEQ ID NO: 1521 - RNA, 19 nt, Artificial Sequence
  Description of Artificial Sequence: Synthetic oligonucleotide
acggccgugcaguggacug

SEQ ID NO: 1522 - RNA, 19 nt, Artificial Sequence
  Description of Artificial Sequence: Synthetic oligonucleotide
ggugggggcugggcguggu

SEQ ID NO: 1523 - RNA, 19 nt, Artificial Sequence
  Description of Artificial Sequence: Synthetic oligonucleotide
ucauguacgagaugaugug

SEQ ID NO: 1524 - RNA, 19 nt, Artificial Sequence
  Description of Artificial Sequence: Synthetic oligonucleotide
gcggucgccugcccuucua

SEQ ID NO: 1525 - RNA, 19 nt, Artificial Sequence
  Description of Artificial Sequence: Synthetic oligonucleotide
acaaccaggaccaugagaa

SEQ ID NO: 1526 - RNA, 19 nt, Artificial Sequence
  Description of Artificial Sequence: Synthetic oligonucleotide
agcuuuuugagcucauccu

SEQ ID NO: 1527 - RNA, 19 nt, Artificial Sequence
  Description of Artificial Sequence: Synthetic oligonucleotide
ucauggaggagauccgcuu

SEQ ID NO: 1528 - RNA, 19 nt, Artificial Sequence
  Description of Artificial Sequence: Synthetic oligonucleotide
ucccgcgcacgcuuggucc

SEQ ID NO: 1529 - RNA, 19 nt, Artificial Sequence
  Description of Artificial Sequence: Synthetic oligonucleotide
ccgaggccaaguccuugcu

SEQ ID NO: 1530 - RNA, 19 nt, Artificial Sequence
  Description of Artificial Sequence: Synthetic oligonucleotide
uuucagggcugcucaagaa

SEQ ID NO: 1531 - RNA, 19 nt, Artificial Sequence
  Description of Artificial Sequence: Synthetic oligonucleotide
aggaccccaagcagaggcu

SEQ ID NO: 1532 - RNA, 19 nt, Artificial Sequence
  Description of Artificial Sequence: Synthetic oligonucleotide
uuggcgggggcuccgagga

SEQ ID NO: 1533 - RNA, 19 nt, Artificial Sequence
  Description of Artificial Sequence: Synthetic oligonucleotide
acgccaaggagaucaugca

SEQ ID NO: 1534 - RNA, 19 nt, Artificial Sequence
  Description of Artificial Sequence: Synthetic oligonucleotide
agcaucgcuucuuugccgg

SEQ ID NO: 1535 - RNA, 19 nt, Artificial Sequence
  Description of Artificial Sequence: Synthetic oligonucleotide
guaucguguggcagcacgu

SEQ ID NO: 1536 - RNA, 19 nt, Artificial Sequence
  Description of Artificial Sequence: Synthetic oligonucleotide
uguacgagaagaagcucag

SEQ ID NO: 1537 - RNA, 19 nt, Artificial Sequence
  Description of Artificial Sequence: Synthetic oligonucleotide
gcccacccuucaagcccca

SEQ ID NO: 1538 - RNA, 19 nt, Artificial Sequence
  Description of Artificial Sequence: Synthetic oligonucleotide
aggucacgucggagacuga

SEQ ID NO: 1539 - RNA, 19 nt, Artificial Sequence
  Description of Artificial Sequence: Synthetic oligonucleotide
acaccagguauuuugauga

SEQ ID NO: 1540 - RNA, 19 nt, Artificial Sequence
  Description of Artificial Sequence: Synthetic oligonucleotide
aggaguucacggcccagau

SEQ ID NO: 1541 - RNA, 19 nt, Artificial Sequence
  Description of Artificial Sequence: Synthetic oligonucleotide
ugaucaccaucacaccacc

SEQ ID NO: 1542 - RNA, 19 nt, Artificial Sequence
  Description of Artificial Sequence: Synthetic oligonucleotide
cugaccaagaugacagcau

SEQ ID NO: 1543 - RNA, 19 nt, Artificial Sequence
  Description of Artificial Sequence: Synthetic oligonucleotide
uggaguguguggacagcga

SEQ ID NO: 1544 - RNA, 19 nt, Artificial Sequence
  Description of Artificial Sequence: Synthetic oligonucleotide
agcgcaggccccacuuccc

SEQ ID NO: 1545 - RNA, 19 nt, Artificial Sequence
  Description of Artificial Sequence: Synthetic oligonucleotide
cccaguucuccuacucggc

SEQ ID NO: 1546 - RNA, 19 nt, Artificial Sequence
  Description of Artificial Sequence: Synthetic oligonucleotide
ccagcggcacggccugagg

SEQ ID NO: 1547 - RNA, 19 nt, Artificial Sequence
  Description of Artificial Sequence: Synthetic oligonucleotide
gcggcgguggacugcgcug

SEQ ID NO: 1548 - RNA, 19 nt, Artificial Sequence
  Description of Artificial Sequence: Synthetic oligonucleotide
ggacgauagcuuggaggga

SEQ ID NO: 1549 - RNA, 19 nt, Artificial Sequence
  Description of Artificial Sequence: Synthetic oligonucleotide
auggagaggcggccucgug

SEQ ID NO: 1550 - RNA, 19 nt, Artificial Sequence
  Description of Artificial Sequence: Synthetic oligonucleotide
gccaugaucuguauuuaau

SEQ ID NO: 1551 - RNA, 19 nt, Artificial Sequence
  Description of Artificial Sequence: Synthetic oligonucleotide
ugguuuuuauuucucgggu

SEQ ID NO: 1552 - RNA, 19 nt, Artificial Sequence
  Description of Artificial Sequence: Synthetic oligonucleotide
ugcauuugagagaagccac

SEQ ID NO: 1553 - RNA, 19 nt, Artificial Sequence
  Description of Artificial Sequence: Synthetic oligonucleotide
cgcuguccucucgagccca

SEQ ID NO: 1554 - RNA, 19 nt, Artificial Sequence
  Description of Artificial Sequence: Synthetic oligonucleotide
agauggaaagacguuuuug

SEQ ID NO: 1555 - RNA, 19 nt, Artificial Sequence
  Description of Artificial Sequence: Synthetic oligonucleotide
gugcugugggcagcacccu

SEQ ID NO: 1556 - RNA, 19 nt, Artificial Sequence
  Description of Artificial Sequence: Synthetic oligonucleotide
ucccccgcagcgggguagg

SEQ ID NO: 1557 - RNA, 19 nt, Artificial Sequence
  Description of Artificial Sequence: Synthetic oligonucleotide
ggaagaaaacuauccugcg

SEQ ID NO: 1558 - RNA, 19 nt, Artificial Sequence
  Description of Artificial Sequence: Synthetic oligonucleotide
ggguuuuaauuuauuucau

SEQ ID NO: 1559 - RNA, 19 nt, Artificial Sequence
  Description of Artificial Sequence: Synthetic oligonucleotide
uccaguuuguucuccgggu

SEQ ID NO: 1560 - RNA, 19 nt, Artificial Sequence
  Description of Artificial Sequence: Synthetic oligonucleotide
uguggccucagcccucaga

SEQ ID NO: 1561 - RNA, 19 nt, Artificial Sequence
  Description of Artificial Sequence: Synthetic oligonucleotide
aacaauccgauucacguag

SEQ ID NO: 1562 - RNA, 19 nt, Artificial Sequence
  Description of Artificial Sequence: Synthetic oligonucleotide
gggaaauguuaaggacuuc

SEQ ID NO: 1563 - RNA, 19 nt, Artificial Sequence
  Description of Artificial Sequence: Synthetic oligonucleotide
cugcagcuaugcgcaaugu

SEQ ID NO: 1564 - RNA, 19 nt, Artificial Sequence
  Description of Artificial Sequence: Synthetic oligonucleotide
uggcauuggggggccgggc

SEQ ID NO: 1565 - RNA, 19 nt, Artificial Sequence
  Description of Artificial Sequence: Synthetic oligonucleotide
cagguccugcccauguguc

SEQ ID NO: 1566 - RNA, 19 nt, Artificial Sequence
  Description of Artificial Sequence: Synthetic oligonucleotide
ccccucacucugucagcca

SEQ ID NO: 1567 - RNA, 19 nt, Artificial Sequence
  Description of Artificial Sequence: Synthetic oligonucleotide
agccgcccugggcugucug

SEQ ID NO: 1568 - RNA, 19 nt, Artificial Sequence
  Description of Artificial Sequence: Synthetic oligonucleotide
gucaccagcuaucugucau

SEQ ID NO: 1569 - RNA, 19 nt, Artificial Sequence
  Description of Artificial Sequence: Synthetic oligonucleotide
ucucucuggggcccugggc

SEQ ID NO: 1570 - RNA, 19 nt, Artificial Sequence
  Description of Artificial Sequence: Synthetic oligonucleotide
ccucaguucaaccuggugg

SEQ ID NO: 1571 - RNA, 19 nt, Artificial Sequence
  Description of Artificial Sequence: Synthetic oligonucleotide
gcaccagaugcaaccucac

SEQ ID NO: 1572 - RNA, 19 nt, Artificial Sequence
  Description of Artificial Sequence: Synthetic oligonucleotide
cuaugguaugcuggccagc

SEQ ID NO: 1573 - RNA, 19 nt, Artificial Sequence
  Description of Artificial Sequence: Synthetic oligonucleotide
cacccucuccugggggugg

SEQ ID NO: 1574 - RNA, 19 nt, Artificial Sequence
  Description of Artificial Sequence: Synthetic oligonucleotide
gcaggcacacagcagcccc

SEQ ID NO: 1575 - RNA, 19 nt, Artificial Sequence
  Description of Artificial Sequence: Synthetic oligonucleotide
cccagcacuaaggccgugu

SEQ ID NO: 1576 - RNA, 19 nt, Artificial Sequence
  Description of Artificial Sequence: Synthetic oligonucleotide
ucucugaggacgucaucgg

SEQ ID NO: 1577 - RNA, 19 nt, Artificial Sequence
  Description of Artificial Sequence: Synthetic oligonucleotide
gaggcugggccccugggau

SEQ ID NO: 1578 - RNA, 19 nt, Artificial Sequence
  Description of Artificial Sequence: Synthetic oligonucleotide
ugggaccagggauggggga

SEQ ID NO: 1579 - RNA, 19 nt, Artificial Sequence
  Description of Artificial Sequence: Synthetic oligonucleotide
augggccaggguuuaccca

SEQ ID NO: 1580 - RNA, 19 nt, Artificial Sequence
  Description of Artificial Sequence: Synthetic oligonucleotide
agugggacagaggagcaag

SEQ ID NO: 1581 - RNA, 19 nt, Artificial Sequence
  Description of Artificial Sequence: Synthetic oligonucleotide
gguuuaaauuuguuauugu

SEQ ID NO: 1582 - RNA, 19 nt, Artificial Sequence
  Description of Artificial Sequence: Synthetic oligonucleotide
uguauuauguuguucaaau

SEQ ID NO: 1583 - RNA, 19 nt, Artificial Sequence
  Description of Artificial Sequence: Synthetic oligonucleotide
ugcauuuuggggguuuuua

SEQ ID NO: 1584 - RNA, 19 nt, Artificial Sequence
  Description of Artificial Sequence: Synthetic oligonucleotide
aaucuuugugacaggaaag

SEQ ID NO: 1585 - RNA, 19 nt, Artificial Sequence
  Description of Artificial Sequence: Synthetic oligonucleotide
gcccucccccuuccccuuc

SEQ ID NO: 1586 - RNA, 19 nt, Artificial Sequence
  Description of Artificial Sequence: Synthetic oligonucleotide
cugugucacaguucuuggu

SEQ ID NO: 1587 - RNA, 19 nt, Artificial Sequence
  Description of Artificial Sequence: Synthetic oligonucleotide
ugacugucccaccgggagc

SEQ ID NO: 1588 - RNA, 19 nt, Artificial Sequence
  Description of Artificial Sequence: Synthetic oligonucleotide
ccucccccucagaugaucu

SEQ ID NO: 1589 - RNA, 19 nt, Artificial Sequence
  Description of Artificial Sequence: Synthetic oligonucleotide
ucuccacgguagcacuuga

SEQ ID NO: 1590 - RNA, 19 nt, Artificial Sequence
  Description of Artificial Sequence: Synthetic oligonucleotide
accuuuucgacgcuuaacc

SEQ ID NO: 1591 - RNA, 19 nt, Artificial Sequence
  Description of Artificial Sequence: Synthetic oligonucleotide
cuuuccgcugucgccccag

SEQ ID NO: 1592 - RNA, 19 nt, Artificial Sequence
  Description of Artificial Sequence: Synthetic oligonucleotide
ggcccucccugacucccug

SEQ ID NO: 1593 - RNA, 19 nt, Artificial Sequence
  Description of Artificial Sequence: Synthetic oligonucleotide
guggggguggccaucccug

SEQ ID NO: 1594 - RNA, 19 nt, Artificial Sequence
  Description of Artificial Sequence: Synthetic oligonucleotide
gggccccuccacgccuccu

SEQ ID NO: 1595 - RNA, 19 nt, Artificial Sequence
  Description of Artificial Sequence: Synthetic oligonucleotide
uggccagacgcugccgcug

SEQ ID NO: 1596 - RNA, 19 nt, Artificial Sequence
  Description of Artificial Sequence: Synthetic oligonucleotide
gccgcugcaccacggcguu

SEQ ID NO: 1597 - RNA, 19 nt, Artificial Sequence
  Description of Artificial Sequence: Synthetic oligonucleotide
uuuuuuacaacauucaacu

SEQ ID NO: 1598 - RNA, 19 nt, Artificial Sequence
  Description of Artificial Sequence: Synthetic oligonucleotide
uuuaguauuuuuacuauua

SEQ ID NO: 1599 - RNA, 19 nt, Artificial Sequence
  Description of Artificial Sequence: Synthetic oligonucleotide
auaauauaauauggaaccu

SEQ ID NO: 1600 - RNA, 19 nt, Artificial Sequence
  Description of Artificial Sequence: Synthetic oligonucleotide
uucccuccaaauucuucaa

SEQ ID NO: 1601 - RNA, 19 nt, Artificial Sequence
  Description of Artificial Sequence: Synthetic oligonucleotide
auaaaaguugcuuuucaaa

SEQ ID NO: 1602 - RNA, 25 nt, Artificial Sequence
  Description of Artificial Sequence: Synthetic oligonucleotide
cggcaggaccgagcgcggcaggcgg

SEQ ID NO: 1603 - RNA, 25 nt, Artificial Sequence
  Description of Artificial Sequence: Synthetic oligonucleotide
gcuggcccagcgcagccagcgcggc

SEQ ID NO: 1604 - RNA, 25 nt, Artificial Sequence
  Description of Artificial Sequence: Synthetic oligonucleotide
cccgaaggacgggagcaggcggccg

SEQ ID NO: 1605 - RNA, 25 nt, Artificial Sequence
  Description of Artificial Sequence: Synthetic oligonucleotide
gagcaccgagcgcugggcaccgggc

SEQ ID NO: 1606 - RNA, 25 nt, Artificial Sequence
  Description of Artificial Sequence: Synthetic oligonucleotide
caccgagcggcggcggcacgcgagg

SEQ ID NO: 1607 - RNA, 25 nt, Artificial Sequence
  Description of Artificial Sequence: Synthetic oligonucleotide
gcccggccccgagcagcgcccccgc

SEQ ID NO: 1608 - RNA, 25 nt, Artificial Sequence
  Description of Artificial Sequence: Synthetic oligonucleotide
cccgccgcggccuccagcccggccc

SEQ ID NO: 1609 - RNA, 25 nt, Artificial Sequence
  Description of Artificial Sequence: Synthetic oligonucleotide
ccgcccagcgccggcccgcggggau

SEQ ID NO: 1610 - RNA, 25 nt, Artificial Sequence
  Description of Artificial Sequence: Synthetic oligonucleotide
ugcggagcggcgggcgccggaggcc

SEQ ID NO: 1611 - RNA, 25 nt, Artificial Sequence
  Description of Artificial Sequence: Synthetic oligonucleotide
cgcggcccggcuaggcccgcgcucg

SEQ ID NO: 1612 - RNA, 25 nt, Artificial Sequence
  Description of Artificial Sequence: Synthetic oligonucleotide
gcgcccggacgcggcggcccgaggc

SEQ ID NO: 1613 - RNA, 25 nt, Artificial Sequence
  Description of Artificial Sequence: Synthetic oligonucleotide
cuguggccaggccagcugggcucgg

SEQ ID NO: 1614 - RNA, 25 nt, Artificial Sequence
  Description of Artificial Sequence: Synthetic oligonucleotide
gggagcgccagccugagaggagcgc

SEQ ID NO: 1615 - RNA, 25 nt, Artificial Sequence
  Description of Artificial Sequence: Synthetic oligonucleotide
cgugagcgucgcgggagccucgggc

SEQ ID NO: 1616 - RNA, 25 nt, Artificial Sequence
  Description of Artificial Sequence: Synthetic oligonucleotide
caccaugagcgacguggcuauugug

SEQ ID NO: 1617 - RNA, 25 nt, Artificial Sequence
  Description of Artificial Sequence: Synthetic oligonucleotide
gaaggaggguuggcugcacaaacga

SEQ ID NO: 1618 - RNA, 25 nt, Artificial Sequence
  Description of Artificial Sequence: Synthetic oligonucleotide
aggggaguacaucaagaccuggcgg

SEQ ID NO: 1619 - RNA, 25 nt, Artificial Sequence
  Description of Artificial Sequence: Synthetic oligonucleotide
gccacgcuacuuccuccucaagaau

SEQ ID NO: 1620 - RNA, 25 nt, Artificial Sequence
  Description of Artificial Sequence: Synthetic oligonucleotide
ugauggcaccuucauuggcuacaag

SEQ ID NO: 1621 - RNA, 25 nt, Artificial Sequence
  Description of Artificial Sequence: Synthetic oligonucleotide
ggagcggccgcaggauguggaccaa

SEQ ID NO: 1622 - RNA, 25 nt, Artificial Sequence
  Description of Artificial Sequence: Synthetic oligonucleotide
acgugaggcuccccucaacaacuuc

SEQ ID NO: 1623 - RNA, 25 nt, Artificial Sequence
  Description of Artificial Sequence: Synthetic oligonucleotide
cucuguggcgcagugccagcugaug

SEQ ID NO: 1624 - RNA, 25 nt, Artificial Sequence
  Description of Artificial Sequence: Synthetic oligonucleotide
gaagacggagcggccccggcccaac

SEQ ID NO: 1625 - RNA, 25 nt, Artificial Sequence
  Description of Artificial Sequence: Synthetic oligonucleotide
caccuucaucauccgcugccugcag

SEQ ID NO: 1626 - RNA, 25 nt, Artificial Sequence
  Description of Artificial Sequence: Synthetic oligonucleotide
guggaccacugucaucgaacgcacc

SEQ ID NO: 1627 - RNA, 25 nt, Artificial Sequence
  Description of Artificial Sequence: Synthetic oligonucleotide
cuuccauguggagacuccugaggag

SEQ ID NO: 1628 - RNA, 25 nt, Artificial Sequence
  Description of Artificial Sequence: Synthetic oligonucleotide
gcgggaggaguggacaaccgccauc

SEQ ID NO: 1629 - RNA, 25 nt, Artificial Sequence
  Description of Artificial Sequence: Synthetic oligonucleotide
ccagacuguggcugacggccucaag

SEQ ID NO: 1630 - RNA, 25 nt, Artificial Sequence
  Description of Artificial Sequence: Synthetic oligonucleotide
gaagcaggaggaggaggagauggac

SEQ ID NO: 1631 - RNA, 25 nt, Artificial Sequence
  Description of Artificial Sequence: Synthetic oligonucleotide
cuuccggucgggcucacccagugac

SEQ ID NO: 1632 - RNA, 25 nt, Artificial Sequence
  Description of Artificial Sequence: Synthetic oligonucleotide
caacucaggggcugaagagauggag

SEQ ID NO: 1633 - RNA, 25 nt, Artificial Sequence
  Description of Artificial Sequence: Synthetic oligonucleotide
ggugucccuggccaagcccaagcac

SEQ ID NO: 1634 - RNA, 25 nt, Artificial Sequence
  Description of Artificial Sequence: Synthetic oligonucleotide
ccgcgugaccaugaacgaguuugag

SEQ ID NO: 1635 - RNA, 25 nt, Artificial Sequence
  Description of Artificial Sequence: Synthetic oligonucleotide
guaccugaagcugcugggcaagggc

SEQ ID NO: 1636 - RNA, 25 nt, Artificial Sequence
  Description of Artificial Sequence: Synthetic oligonucleotide
cacuuucggcaaggugauccuggug

SEQ ID NO: 1637 - RNA, 25 nt, Artificial Sequence
  Description of Artificial Sequence: Synthetic oligonucleotide
gaaggagaaggccacaggccgcuac

SEQ ID NO: 1638 - RNA, 25 nt, Artificial Sequence
  Description of Artificial Sequence: Synthetic oligonucleotide
cuacgccaugaagauccucaagaag

SEQ ID NO: 1639 - RNA, 25 nt, Artificial Sequence
  Description of Artificial Sequence: Synthetic oligonucleotide
ggaagucaucguggccaaggacgag

SEQ ID NO: 1640 - RNA, 25 nt, Artificial Sequence
  Description of Artificial Sequence: Synthetic oligonucleotide
gguggcccacacacucaccgagaac

SEQ ID NO: 1641 - RNA, 25 nt, Artificial Sequence
  Description of Artificial Sequence: Synthetic oligonucleotide
ccgcguccugcagaacuccaggcac

SEQ ID NO: 1642 - RNA, 25 nt, Artificial Sequence
  Description of Artificial Sequence: Synthetic oligonucleotide
ccccuuccucacagcccugaaguac

SEQ ID NO: 1643 - RNA, 25 nt, Artificial Sequence
  Description of Artificial Sequence: Synthetic oligonucleotide
cucuuuccagacccacgaccgccuc

SEQ ID NO: 1644 - RNA, 25 nt, Artificial Sequence
  Description of Artificial Sequence: Synthetic oligonucleotide
cugcuuugucauggaguacgccaac

SEQ ID NO: 1645 - RNA, 25 nt, Artificial Sequence
  Description of Artificial Sequence: Synthetic oligonucleotide
cgggggcgagcuguucuuccaccug

SEQ ID NO: 1646 - RNA, 25 nt, Artificial Sequence
  Description of Artificial Sequence: Synthetic oligonucleotide
gucccgggagcguguguucuccgag

SEQ ID NO: 1647 - RNA, 25 nt, Artificial Sequence
  Description of Artificial Sequence: Synthetic oligonucleotide
ggaccgggcccgcuucuauggcgcu

SEQ ID NO: 1648 - RNA, 25 nt, Artificial Sequence
  Description of Artificial Sequence: Synthetic oligonucleotide
ugagauugugucagcccuggacuac

SEQ ID NO: 1649 - RNA, 25 nt, Artificial Sequence
  Description of Artificial Sequence: Synthetic oligonucleotide
ccugcacucggagaagaacguggug

SEQ ID NO: 1650 - RNA, 25 nt, Artificial Sequence
  Description of Artificial Sequence: Synthetic oligonucleotide
guaccgggaccucaagcuggagaac

SEQ ID NO: 1651 - RNA, 25 nt, Artificial Sequence
  Description of Artificial Sequence: Synthetic oligonucleotide
ccucaugcuggacaaggacgggcac

SEQ ID NO: 1652 - RNA, 25 nt, Artificial Sequence
  Description of Artificial Sequence: Synthetic oligonucleotide
cauuaagaucacagacuucgggcug

SEQ ID NO: 1653 - RNA, 25 nt, Artificial Sequence
  Description of Artificial Sequence: Synthetic oligonucleotide
gugcaaggaggggaucaaggacggu

SEQ ID NO: 1654 - RNA, 25 nt, Artificial Sequence
  Description of Artificial Sequence: Synthetic oligonucleotide
ugccaccaugaagaccuuuugcggc

SEQ ID NO: 1655 - RNA, 25 nt, Artificial Sequence
  Description of Artificial Sequence: Synthetic oligonucleotide
cacaccugaguaccuggcccccgag

SEQ ID NO: 1656 - RNA, 25 nt, Artificial Sequence
  Description of Artificial Sequence: Synthetic oligonucleotide
ggugcuggaggacaaugacuacggc

SEQ ID NO: 1657 - RNA, 25 nt, Artificial Sequence
  Description of Artificial Sequence: Synthetic oligonucleotide
ccgugcaguggacuggugggggcug

SEQ ID NO: 1658 - RNA, 25 nt, Artificial Sequence
  Description of Artificial Sequence: Synthetic oligonucleotide
gggcguggucauguacgagaugaug

SEQ ID NO: 1659 - RNA, 25 nt, Artificial Sequence
  Description of Artificial Sequence: Synthetic oligonucleotide
gugcggucgccugcccuucuacaac

SEQ ID NO: 1660 - RNA, 25 nt, Artificial Sequence
  Description of Artificial Sequence: Synthetic oligonucleotide
ccaggaccaugagaagcuuuuugag

SEQ ID NO: 1661 - RNA, 25 nt, Artificial Sequence
  Description of Artificial Sequence: Synthetic oligonucleotide
gcucauccucauggaggagauccgc

SEQ ID NO: 1662 - RNA, 25 nt, Artificial Sequence
  Description of Artificial Sequence: Synthetic oligonucleotide
cuucccgcgcacgcuuggucccgag

SEQ ID NO: 1663 - RNA, 25 nt, Artificial Sequence
  Description of Artificial Sequence: Synthetic oligonucleotide
ggccaaguccuugcuuucagggcug

SEQ ID NO: 1664 - RNA, 25 nt, Artificial Sequence
  Description of Artificial Sequence: Synthetic oligonucleotide
gcucaagaaggaccccaagcagagg

SEQ ID NO: 1665 - RNA, 25 nt, Artificial Sequence
  Description of Artificial Sequence: Synthetic oligonucleotide
gcuuggcgggggcuccgaggacgcc

SEQ ID NO: 1666 - RNA, 25 nt, Artificial Sequence
  Description of Artificial Sequence: Synthetic oligonucleotide
caaggagaucaugcagcaucgcuuc

SEQ ID NO: 1667 - RNA, 25 nt, Artificial Sequence
  Description of Artificial Sequence: Synthetic oligonucleotide
cuuugccgguaucguguggcagcac

SEQ ID NO: 1668 - RNA, 25 nt, Artificial Sequence
  Description of Artificial Sequence: Synthetic oligonucleotide
cguguacgagaagaagcucagccca

SEQ ID NO: 1669 - RNA, 25 nt, Artificial Sequence
  Description of Artificial Sequence: Synthetic oligonucleotide
acccuucaagccccaggucacgucg

SEQ ID NO: 1670 - RNA, 25 nt, Artificial Sequence
  Description of Artificial Sequence: Synthetic oligonucleotide
ggagacugacaccagguauuuugau

SEQ ID NO: 1671 - RNA, 25 nt, Artificial Sequence
  Description of Artificial Sequence: Synthetic oligonucleotide
ugaggaguucacggcccagaugauc

SEQ ID NO: 1672 - RNA, 25 nt, Artificial Sequence
  Description of Artificial Sequence: Synthetic oligonucleotide
caccaucacaccaccugaccaagau

SEQ ID NO: 1673 - RNA, 25 nt, Artificial Sequence
  Description of Artificial Sequence: Synthetic oligonucleotide
ugacagcauggaguguguggacagc

SEQ ID NO: 1674 - RNA, 25 nt, Artificial Sequence
  Description of Artificial Sequence: Synthetic oligonucleotide
cgagcgcaggccccacuucccccag

SEQ ID NO: 1675 - RNA, 25 nt, Artificial Sequence
  Description of Artificial Sequence: Synthetic oligonucleotide
guucuccuacucggccagcggcacg

SEQ ID NO: 1676 - RNA, 25 nt, Artificial Sequence
  Description of Artificial Sequence: Synthetic oligonucleotide
ggccugaggcggcgguggacugcgc

SEQ ID NO: 1677 - RNA, 25 nt, Artificial Sequence
  Description of Artificial Sequence: Synthetic oligonucleotide
cuggacgauagcuuggagggaugga

SEQ ID NO: 1678 - RNA, 25 nt, Artificial Sequence
  Description of Artificial Sequence: Synthetic oligonucleotide
agaggcggccucgugccaugaucug

SEQ ID NO: 1679 - RNA, 25 nt, Artificial Sequence
  Description of Artificial Sequence: Synthetic oligonucleotide
guauuuaaugguuuuuauuucucgg

SEQ ID NO: 1680 - RNA, 25 nt, Artificial Sequence
  Description of Artificial Sequence: Synthetic oligonucleotide
ggugcauuugagagaagccacgcug

SEQ ID NO: 1681 - RNA, 25 nt, Artificial Sequence
  Description of Artificial Sequence: Synthetic oligonucleotide
guccucucgagcccagauggaaaga

SEQ ID NO: 1682 - RNA, 25 nt, Artificial Sequence
  Description of Artificial Sequence: Synthetic oligonucleotide
acguuuuugugcugugggcagcacc

SEQ ID NO: 1683 - RNA, 25 nt, Artificial Sequence
  Description of Artificial Sequence: Synthetic oligonucleotide
ccucccccgcagcgggguagggaag

SEQ ID NO: 1684 - RNA, 25 nt, Artificial Sequence
  Description of Artificial Sequence: Synthetic oligonucleotide
gaaaacuauccugcggguuuuaauu

SEQ ID NO: 1685 - RNA, 25 nt, Artificial Sequence
  Description of Artificial Sequence: Synthetic oligonucleotide
uuauuucauccaguuuguucuccgg

SEQ ID NO: 1686 - RNA, 25 nt, Artificial Sequence
  Description of Artificial Sequence: Synthetic oligonucleotide
gguguggccucagcccucagaacaa

SEQ ID NO: 1687 - RNA, 25 nt, Artificial Sequence
  Description of Artificial Sequence: Synthetic oligonucleotide
auccgauucacguagggaaauguua

SEQ ID NO: 1688 - RNA, 25 nt, Artificial Sequence
  Description of Artificial Sequence: Synthetic oligonucleotide
aaggacuucugcagcuaugcgcaau

SEQ ID NO: 1689 - RNA, 25 nt, Artificial Sequence
  Description of Artificial Sequence: Synthetic oligonucleotide
uguggcauuggggggccgggcaggu

SEQ ID NO: 1690 - RNA, 25 nt, Artificial Sequence
  Description of Artificial Sequence: Synthetic oligonucleotide
uccugcccauguguccccucacucu

SEQ ID NO: 1691 - RNA, 25 nt, Artificial Sequence
  Description of Artificial Sequence: Synthetic oligonucleotide
ugucagccagccgcccugggcuguc

SEQ ID NO: 1692 - RNA, 25 nt, Artificial Sequence
  Description of Artificial Sequence: Synthetic oligonucleotide
cugucaccagcuaucugucaucucu

SEQ ID NO: 1693 - RNA, 25 nt, Artificial Sequence
  Description of Artificial Sequence: Synthetic oligonucleotide
ucuggggcccugggccucaguucaa

SEQ ID NO: 1694 - RNA, 25 nt, Artificial Sequence
  Description of Artificial Sequence: Synthetic oligonucleotide
accugguggcaccagaugcaaccuc

SEQ ID NO: 1695 - RNA, 25 nt, Artificial Sequence
  Description of Artificial Sequence: Synthetic oligonucleotide
cacuaugguaugcuggccagcaccc

SEQ ID NO: 1696 - RNA, 25 nt, Artificial Sequence
  Description of Artificial Sequence: Synthetic oligonucleotide
cucuccuggggguggcaggcacaca

SEQ ID NO: 1697 - RNA, 25 nt, Artificial Sequence
  Description of Artificial Sequence: Synthetic oligonucleotide
agcagccccccagcacuaaggccgu

SEQ ID NO: 1698 - RNA, 25 nt, Artificial Sequence
  Description of Artificial Sequence: Synthetic oligonucleotide
ugucucugaggacgucaucggaggc

SEQ ID NO: 1699 - RNA, 25 nt, Artificial Sequence
  Description of Artificial Sequence: Synthetic oligonucleotide
cugggccccugggaugggaccaggg

SEQ ID NO: 1700 - RNA, 25 nt, Artificial Sequence
  Description of Artificial Sequence: Synthetic oligonucleotide
gaugggggaugggccaggguuuacc

SEQ ID NO: 1701 - RNA, 25 nt, Artificial Sequence
  Description of Artificial Sequence: Synthetic oligonucleotide
ccagugggacagaggagcaagguuu

SEQ ID NO: 1702 - RNA, 25 nt, Artificial Sequence
  Description of Artificial Sequence: Synthetic oligonucleotide
uaaauuuguuauuguguauuauguu

SEQ ID NO: 1703 - RNA, 25 nt, Artificial Sequence
  Description of Artificial Sequence: Synthetic oligonucleotide
uguucaaaugcauuuuggggguuuu

SEQ ID NO: 1704 - RNA, 25 nt, Artificial Sequence
  Description of Artificial Sequence: Synthetic oligonucleotide
ucccccuuccccuucugugucacag

SEQ ID NO: 1705 - RNA, 25 nt, Artificial Sequence
  Description of Artificial Sequence: Synthetic oligonucleotide
guucuuggugacugucccaccggga

SEQ ID NO: 1706 - RNA, 25 nt, Artificial Sequence
  Description of Artificial Sequence: Synthetic oligonucleotide
agccucccccucagaugaucucucc

SEQ ID NO: 1707 - RNA, 25 nt, Artificial Sequence
  Description of Artificial Sequence: Synthetic oligonucleotide
cacgguagcacuugaccuuuucgac

SEQ ID NO: 1708 - RNA, 25 nt, Artificial Sequence
  Description of Artificial Sequence: Synthetic oligonucleotide
cgcuuaaccuuuccgcugucgcccc

SEQ ID NO: 1709 - RNA, 25 nt, Artificial Sequence
  Description of Artificial Sequence: Synthetic oligonucleotide
caggcccucccugacucccuguggg

SEQ ID NO: 1710 - RNA, 25 nt, Artificial Sequence
  Description of Artificial Sequence: Synthetic oligonucleotide
ggguggccaucccugggccccucca

SEQ ID NO: 1711 - RNA, 25 nt, Artificial Sequence
  Description of Artificial Sequence: Synthetic oligonucleotide
acgccuccuggccagacgcugccgc

SEQ ID NO: 1712 - RNA, 25 nt, Artificial Sequence
  Description of Artificial Sequence: Synthetic oligonucleotide
cugccgcugcaccacggcguuuuuu

SEQ ID NO: 1713 - RNA, 25 nt, Artificial Sequence
  Description of Artificial Sequence: Synthetic oligonucleotide
uuacaacauucaacuuuaguauuuu

SEQ ID NO: 1714 - RNA, 25 nt, Artificial Sequence
  Description of Artificial Sequence: Synthetic oligonucleotide
uuacuauuauaauauaauauggaac

SEQ ID NO: 1715 - RNA, 25 nt, Artificial Sequence
  Description of Artificial Sequence: Synthetic oligonucleotide
ccuucccuccaaauucuucaauaaa

SEQ ID NO: 1716 - RNA, 25 nt, Artificial Sequence
  Description of Artificial Sequence: Synthetic oligonucleotide
gcgcccggacgcggcggcccggggc

SEQ ID NO: 1717 - RNA, 25 nt, Artificial Sequence
  Description of Artificial Sequence: Synthetic oligonucleotide
cuuagggaaggccgagccagccugg

SEQ ID NO: 1718 - RNA, 25 nt, Artificial Sequence
  Description of Artificial Sequence: Synthetic oligonucleotide
ggucaaagaagucaaaggggcugcc

SEQ ID NO: 1719 - RNA, 25 nt, Artificial Sequence
  Description of Artificial Sequence: Synthetic oligonucleotide
cuggaggaggcagccugucagcugg

SEQ ID NO: 1720 - RNA, 25 nt, Artificial Sequence
  Description of Artificial Sequence: Synthetic oligonucleotide
gugcaucagaggcuguggccaggcc

SEQ ID NO: 1721 - RNA, 25 nt, Artificial Sequence
  Description of Artificial Sequence: Synthetic oligonucleotide
cagcugggcucggggagcgccagcc

SEQ ID NO: 1722 - RNA, 25 nt, Artificial Sequence
  Description of Artificial Sequence: Synthetic oligonucleotide
cugagaggagcgcgugagcgucgcg

SEQ ID NO: 1723 - RNA, 25 nt, Artificial Sequence
  Description of Artificial Sequence: Synthetic oligonucleotide
gggagccucgggcaccaugagcgac

SEQ ID NO: 1724 - RNA, 25 nt, Artificial Sequence
  Description of Artificial Sequence: Synthetic oligonucleotide
cguggcuauugugaaggaggguugg

SEQ ID NO: 1725 - RNA, 25 nt, Artificial Sequence
  Description of Artificial Sequence: Synthetic oligonucleotide
gcugcacaaacgaggggaguacauc

SEQ ID NO: 1726 - RNA, 25 nt, Artificial Sequence
  Description of Artificial Sequence: Synthetic oligonucleotide
caagaccuggcggccacgcuacuuc

SEQ ID NO: 1727 - RNA, 25 nt, Artificial Sequence
  Description of Artificial Sequence: Synthetic oligonucleotide
ccuccucaagaaugauggcaccuuc

SEQ ID NO: 1728 - RNA, 25 nt, Artificial Sequence
  Description of Artificial Sequence: Synthetic oligonucleotide
cauuggcuacaaggagcggccgcag

SEQ ID NO: 1729 - RNA, 25 nt, Artificial Sequence
  Description of Artificial Sequence: Synthetic oligonucleotide
ggauguggaccaacgugaggcuccc

SEQ ID NO: 1730 - RNA, 25 nt, Artificial Sequence
  Description of Artificial Sequence: Synthetic oligonucleotide
ccucaacaacuucucuguggcgcag

SEQ ID NO: 1731 - RNA, 25 nt, Artificial Sequence
  Description of Artificial Sequence: Synthetic oligonucleotide
gugccagcugaugaagacggagcgg

SEQ ID NO: 1732 - RNA, 25 nt, Artificial Sequence
  Description of Artificial Sequence: Synthetic oligonucleotide
gccccggcccaacaccuucaucauc

SEQ ID NO: 1733 - RNA, 25 nt, Artificial Sequence
  Description of Artificial Sequence: Synthetic oligonucleotide
ccgcugccugcaguggaccacuguc

SEQ ID NO: 1734 - RNA, 25 nt, Artificial Sequence
  Description of Artificial Sequence: Synthetic oligonucleotide
caucgaacgcaccuuccauguggag

SEQ ID NO: 1735 - RNA, 25 nt, Artificial Sequence
  Description of Artificial Sequence: Synthetic oligonucleotide
gacuccugaggagcgggaggagugg

SEQ ID NO: 1736 - RNA, 25 nt, Artificial Sequence
  Description of Artificial Sequence: Synthetic oligonucleotide
gacaaccgccauccagacuguggcu

SEQ ID NO: 1737 - RNA, 25 nt, Artificial Sequence
  Description of Artificial Sequence: Synthetic oligonucleotide
ugacggccucaagaagcaggaggag

SEQ ID NO: 1738 - RNA, 25 nt, Artificial Sequence
  Description of Artificial Sequence: Synthetic oligonucleotide
ggaggagauggacuuccggucgggc

SEQ ID NO: 1739 - RNA, 25 nt, Artificial Sequence
  Description of Artificial Sequence: Synthetic oligonucleotide
cucacccagugacaacucaggggcu

SEQ ID NO: 1740 - RNA, 25 nt, Artificial Sequence
  Description of Artificial Sequence: Synthetic oligonucleotide
ugaagagauggaggugucccuggcc

SEQ ID NO: 1741 - RNA, 25 nt, Artificial Sequence
  Description of Artificial Sequence: Synthetic oligonucleotide
caagcccaagcaccgcgugaccaug

SEQ ID NO: 1742 - RNA, 25 nt, Artificial Sequence
  Description of Artificial Sequence: Synthetic oligonucleotide
gaacgaguuugaguaccugaagcug

SEQ ID NO: 1743 - RNA, 25 nt, Artificial Sequence
  Description of Artificial Sequence: Synthetic oligonucleotide
gcugggcaagggcacuuucggcaag

SEQ ID NO: 1744 - RNA, 25 nt, Artificial Sequence
  Description of Artificial Sequence: Synthetic oligonucleotide
ggugauccuggugaaggagaaggcc

SEQ ID NO: 1745 - RNA, 25 nt, Artificial Sequence
  Description of Artificial Sequence: Synthetic oligonucleotide
cacaggccgcuacuacgccaugaag

SEQ ID NO: 1746 - RNA, 25 nt, Artificial Sequence
  Description of Artificial Sequence: Synthetic oligonucleotide
gauccucaagaaggaagucaucgug

SEQ ID NO: 1747 - RNA, 25 nt, Artificial Sequence
  Description of Artificial Sequence: Synthetic oligonucleotide
ggccaaggacgagguggcccacaca

SEQ ID NO: 1748 - RNA, 25 nt, Artificial Sequence
  Description of Artificial Sequence: Synthetic oligonucleotide
acucaccgagaaccgcguccugcag

SEQ ID NO: 1749 - RNA, 25 nt, Artificial Sequence
  Description of Artificial Sequence: Synthetic oligonucleotide
gaacuccaggcaccccuuccucaca

SEQ ID NO: 1750 - RNA, 25 nt, Artificial Sequence
  Description of Artificial Sequence: Synthetic oligonucleotide
agcccugaaguacucuuuccagacc

SEQ ID NO: 1751 - RNA, 25 nt, Artificial Sequence
  Description of Artificial Sequence: Synthetic oligonucleotide
ccacgaccgccucugcuuugucaug

SEQ ID NO: 1752 - RNA, 25 nt, Artificial Sequence
  Description of Artificial Sequence: Synthetic oligonucleotide
ggaguacgccaacgggggcgagcug

SEQ ID NO: 1753 - RNA, 25 nt, Artificial Sequence
  Description of Artificial Sequence: Synthetic oligonucleotide
guucuuccaccugucccgggagcgu

SEQ ID NO: 1754 - RNA, 25 nt, Artificial Sequence
  Description of Artificial Sequence: Synthetic oligonucleotide
uguguucuccgaggaccgggcccgc

SEQ ID NO: 1755 - RNA, 25 nt, Artificial Sequence
  Description of Artificial Sequence: Synthetic oligonucleotide
cuucuauggcgcugagauuguguca

SEQ ID NO: 1756 - RNA, 25 nt, Artificial Sequence
  Description of Artificial Sequence: Synthetic oligonucleotide
agcccuggacuaccugcacucggag

SEQ ID NO: 1757 - RNA, 25 nt, Artificial Sequence
  Description of Artificial Sequence: Synthetic oligonucleotide
gaagaacgugguguaccgggaccuc

SEQ ID NO: 1758 - RNA, 25 nt, Artificial Sequence
  Description of Artificial Sequence: Synthetic oligonucleotide
caagcuggagaaccucaugcuggac

SEQ ID NO: 1759 - RNA, 25 nt, Artificial Sequence
  Description of Artificial Sequence: Synthetic oligonucleotide
caaggacgggcacauuaagaucaca

SEQ ID NO: 1760 - RNA, 25 nt, Artificial Sequence
  Description of Artificial Sequence: Synthetic oligonucleotide
agacuucgggcugugcaaggagggg

SEQ ID NO: 1761 - RNA, 25 nt, Artificial Sequence
  Description of Artificial Sequence: Synthetic oligonucleotide
gaucaaggacggugccaccaugaag

SEQ ID NO: 1762 - RNA, 25 nt, Artificial Sequence
  Description of Artificial Sequence: Synthetic oligonucleotide
gaccuuuugcggcacaccugaguac

SEQ ID NO: 1763 - RNA, 25 nt, Artificial Sequence
  Description of Artificial Sequence: Synthetic oligonucleotide
ccuggcccccgaggugcuggaggac

SEQ ID NO: 1764 - RNA, 25 nt, Artificial Sequence
  Description of Artificial Sequence: Synthetic oligonucleotide
caaugacuacggccgugcaguggac

SEQ ID NO: 1765 - RNA, 25 nt, Artificial Sequence
  Description of Artificial Sequence: Synthetic oligonucleotide
cuggugggggcugggcguggucaug

SEQ ID NO: 1766 - RNA, 25 nt, Artificial Sequence
  Description of Artificial Sequence: Synthetic oligonucleotide
guacgagaugaugugcggucgccug

SEQ ID NO: 1767 - RNA, 25 nt, Artificial Sequence
  Description of Artificial Sequence: Synthetic oligonucleotide
gcccuucuacaaccaggaccaugag

SEQ ID NO: 1768 - RNA, 25 nt, Artificial Sequence
  Description of Artificial Sequence: Synthetic oligonucleotide
gaagcuuuuugagcucauccucaug

SEQ ID NO: 1769 - RNA, 25 nt, Artificial Sequence
  Description of Artificial Sequence: Synthetic oligonucleotide
ggaggagauccgcuucccgcgcacg

SEQ ID NO: 1770 - RNA, 25 nt, Artificial Sequence
  Description of Artificial Sequence: Synthetic oligonucleotide
gcuuggucccgaggccaaguccuug

SEQ ID NO: 1771 - RNA, 25 nt, Artificial Sequence
  Description of Artificial Sequence: Synthetic oligonucleotide
gcuuucagggcugcucaagaaggac

SEQ ID NO: 1772 - RNA, 25 nt, Artificial Sequence
  Description of Artificial Sequence: Synthetic oligonucleotide
ccccaagcagaggcuuggcgggggc

SEQ ID NO: 1773 - RNA, 25 nt, Artificial Sequence
  Description of Artificial Sequence: Synthetic oligonucleotide
cuccgaggacgccaaggagaucaug

SEQ ID NO: 1774 - RNA, 25 nt, Artificial Sequence
  Description of Artificial Sequence: Synthetic oligonucleotide
gcagcaucgcuucuuugccgguauc

SEQ ID NO: 1775 - RNA, 25 nt, Artificial Sequence
  Description of Artificial Sequence: Synthetic oligonucleotide
cguguggcagcacguguacgagaag

SEQ ID NO: 1776 - RNA, 25 nt, Artificial Sequence
  Description of Artificial Sequence: Synthetic oligonucleotide
gaagcucagcccacccuucaagccc

SEQ ID NO: 1777 - RNA, 25 nt, Artificial Sequence
  Description of Artificial Sequence: Synthetic oligonucleotide
ccaggucacgucggagacugacacc

SEQ ID NO: 1778 - RNA, 25 nt, Artificial Sequence
  Description of Artificial Sequence: Synthetic oligonucleotide
cagguauuuugaugaggaguucacg

SEQ ID NO: 1779 - RNA, 25 nt, Artificial Sequence
  Description of Artificial Sequence: Synthetic oligonucleotide
accugaccaagaugacagcauggag

SEQ ID NO: 1780 - RNA, 25 nt, Artificial Sequence
  Description of Artificial Sequence: Synthetic oligonucleotide
guguguggacagcgagcgcaggccc

SEQ ID NO: 1781 - RNA, 25 nt, Artificial Sequence
  Description of Artificial Sequence: Synthetic oligonucleotide
ccacuucccccaguucuccuacucg

SEQ ID NO: 1782 - RNA, 25 nt, Artificial Sequence
  Description of Artificial Sequence: Synthetic oligonucleotide
ggccagcggcacggccugaggcggc

SEQ ID NO: 1783 - RNA, 25 nt, Artificial Sequence
  Description of Artificial Sequence: Synthetic oligonucleotide
cgguggacugcgcuggacgauagcu

SEQ ID NO: 1784 - RNA, 25 nt, Artificial Sequence
  Description of Artificial Sequence: Synthetic oligonucleotide
uuggagggauggagaggcggccucg

SEQ ID NO: 1785 - RNA, 25 nt, Artificial Sequence
  Description of Artificial Sequence: Synthetic oligonucleotide
gugccaugaucuguauuuaaugguu

SEQ ID NO: 1786 - RNA, 25 nt, Artificial Sequence
  Description of Artificial Sequence: Synthetic oligonucleotide
uuuuauuucucgggugcauuugaga

SEQ ID NO: 1787 - RNA, 25 nt, Artificial Sequence
  Description of Artificial Sequence: Synthetic oligonucleotide
agaagccacgcuguccucucgagcc

SEQ ID NO: 1788 - RNA, 25 nt, Artificial Sequence
  Description of Artificial Sequence: Synthetic oligonucleotide
ccagauggaaagacguuuuugugcu

SEQ ID NO: 1789 - RNA, 25 nt, Artificial Sequence
  Description of Artificial Sequence: Synthetic oligonucleotide
ugugggcagcacccucccccgcagc

SEQ ID NO: 1790 - RNA, 25 nt, Artificial Sequence
  Description of Artificial Sequence: Synthetic oligonucleotide
cgggguagggaagaaaacuauccug

SEQ ID NO: 1791 - RNA, 25 nt, Artificial Sequence
  Description of Artificial Sequence: Synthetic oligonucleotide
gcggguuuuaauuuauuucauccag

SEQ ID NO: 1792 - RNA, 25 nt, Artificial Sequence
  Description of Artificial Sequence: Synthetic oligonucleotide
guuuguucuccggguguggccucag

SEQ ID NO: 1793 - RNA, 25 nt, Artificial Sequence
  Description of Artificial Sequence: Synthetic oligonucleotide
gcccucagaacaauccgauucacgu

SEQ ID NO: 1794 - RNA, 25 nt, Artificial Sequence
  Description of Artificial Sequence: Synthetic oligonucleotide
uagggaaauguuaaggacuucugca

SEQ ID NO: 1795 - RNA, 25 nt, Artificial Sequence
  Description of Artificial Sequence: Synthetic oligonucleotide
agcuaugcgcaauguggcauugggg

SEQ ID NO: 1796 - RNA, 25 nt, Artificial Sequence
  Description of Artificial Sequence: Synthetic oligonucleotide
gggccgggcagguccugcccaugug

SEQ ID NO: 1797 - RNA, 25 nt, Artificial Sequence
  Description of Artificial Sequence: Synthetic oligonucleotide
guccccucacucugucagccagccg

SEQ ID NO: 1798 - RNA, 25 nt, Artificial Sequence
  Description of Artificial Sequence: Synthetic oligonucleotide
gcccugggcugucugucaccagcua

SEQ ID NO: 1799 - RNA, 25 nt, Artificial Sequence
  Description of Artificial Sequence: Synthetic oligonucleotide
aucugucaucucucuggggcccugg

SEQ ID NO: 1800 - RNA, 25 nt, Artificial Sequence
  Description of Artificial Sequence: Synthetic oligonucleotide
ggccucaguucaaccugguggcacc

SEQ ID NO: 1801 - RNA, 25 nt, Artificial Sequence
  Description of Artificial Sequence: Synthetic oligonucleotide
cagaugcaaccucacuaugguaugc

SEQ ID NO: 1802 - RNA, 25 nt, Artificial Sequence
  Description of Artificial Sequence: Synthetic oligonucleotide
cuggccagcacccucuccugggggu

SEQ ID NO: 1803 - RNA, 25 nt, Artificial Sequence
  Description of Artificial Sequence: Synthetic oligonucleotide
uggcaggcacacagcagccccccag

SEQ ID NO: 1804 - RNA, 25 nt, Artificial Sequence
  Description of Artificial Sequence: Synthetic oligonucleotide
gcacuaaggccgugucucugaggac

SEQ ID NO: 1805 - RNA, 25 nt, Artificial Sequence
  Description of Artificial Sequence: Synthetic oligonucleotide
cgucaucggaggcugggccccuggg

SEQ ID NO: 1806 - RNA, 25 nt, Artificial Sequence
  Description of Artificial Sequence: Synthetic oligonucleotide
gaugggaccagggaugggggauggg

SEQ ID NO: 1807 - RNA, 25 nt, Artificial Sequence
  Description of Artificial Sequence: Synthetic oligonucleotide
gccaggguuuacccagugggacaga

SEQ ID NO: 1808 - RNA, 25 nt, Artificial Sequence
  Description of Artificial Sequence: Synthetic oligonucleotide
aggagcaagguuuaaauuuguuauu

SEQ ID NO: 1809 - RNA, 25 nt, Artificial Sequence
  Description of Artificial Sequence: Synthetic oligonucleotide
uguguauuauguuguucaaaugcau

SEQ ID NO: 1810 - RNA, 25 nt, Artificial Sequence
  Description of Artificial Sequence: Synthetic oligonucleotide
uuuuggggguuuuuaaucuuuguga

SEQ ID NO: 1811 - RNA, 25 nt, Artificial Sequence
  Description of Artificial Sequence: Synthetic oligonucleotide
acaggaaagcccucccccuuccccu

SEQ ID NO: 1812 - RNA, 25 nt, Artificial Sequence
  Description of Artificial Sequence: Synthetic oligonucleotide
uucugugucacaguucuuggugacu

SEQ ID NO: 1813 - RNA, 25 nt, Artificial Sequence
  Description of Artificial Sequence: Synthetic oligonucleotide
ugucccaccgggagccucccccuca

SEQ ID NO: 1814 - RNA, 25 nt, Artificial Sequence
  Description of Artificial Sequence: Synthetic oligonucleotide
agaugaucucuccacgguagcacuu

SEQ ID NO: 1815 - RNA, 25 nt, Artificial Sequence
  Description of Artificial Sequence: Synthetic oligonucleotide
ugaccuuuucgacgcuuaaccuuuc

SEQ ID NO: 1816 - RNA, 25 nt, Artificial Sequence
  Description of Artificial Sequence: Synthetic oligonucleotide
ccgcugucgccccaggcccucccug

SEQ ID NO: 1817 - RNA, 25 nt, Artificial Sequence
  Description of Artificial Sequence: Synthetic oligonucleotide
gacucccuguggggguggccauccc

SEQ ID NO: 1818 - RNA, 25 nt, Artificial Sequence
  Description of Artificial Sequence: Synthetic oligonucleotide
cugggccccuccacgccuccuggcc

SEQ ID NO: 1819 - RNA, 25 nt, Artificial Sequence
  Description of Artificial Sequence: Synthetic oligonucleotide
cagacgcugccgcugccgcugcacc

SEQ ID NO: 1820 - RNA, 25 nt, Artificial Sequence
  Description of Artificial Sequence: Synthetic oligonucleotide
cacggcguuuuuuuacaacauucaa

SEQ ID NO: 1821 - RNA, 25 nt, Artificial Sequence
  Description of Artificial Sequence: Synthetic oligonucleotide
acuuuaguauuuuuacuauuauaau

SEQ ID NO: 1822 - RNA, 25 nt, Artificial Sequence
  Description of Artificial Sequence: Synthetic oligonucleotide
uauaauauggaaccuucccuccaaa

SEQ ID NO: 1823 - RNA, 25 nt, Artificial Sequence
  Description of Artificial Sequence: Synthetic oligonucleotide
auucuucaauaaaaguugcuuuuca

SEQ ID NO: 1824 - RNA, 25 nt, Artificial Sequence
  Description of Artificial Sequence: Synthetic oligonucleotide
uaauuaugggucuguaaccacccug

SEQ ID NO: 1825 - RNA, 25 nt, Artificial Sequence
  Description of Artificial Sequence: Synthetic oligonucleotide
ggacugggugcuccucacugacgga

SEQ ID NO: 1826 - RNA, 25 nt, Artificial Sequence
  Description of Artificial Sequence: Synthetic oligonucleotide
acuugucugaaccucucuuugucuc

SEQ ID NO: 1827 - RNA, 25 nt, Artificial Sequence
  Description of Artificial Sequence: Synthetic oligonucleotide
ccagcgcccagcacugggccuggca

SEQ ID NO: 1828 - RNA, 25 nt, Artificial Sequence
  Description of Artificial Sequence: Synthetic oligonucleotide
aaaaccugagacgcccgguacaugu

SEQ ID NO: 1829 - RNA, 25 nt, Artificial Sequence
  Description of Artificial Sequence: Synthetic oligonucleotide
uuggccaaaugaaugaaccagauuc

SEQ ID NO: 1830 - RNA, 25 nt, Artificial Sequence
  Description of Artificial Sequence: Synthetic oligonucleotide
cagaccggcaggggcgcugugguuu

SEQ ID NO: 1831 - RNA, 25 nt, Artificial Sequence
  Description of Artificial Sequence: Synthetic oligonucleotide
uaggaggggccugggguuucuccca

SEQ ID NO: 1832 - RNA, 25 nt, Artificial Sequence
  Description of Artificial Sequence: Synthetic oligonucleotide
aggagguuuuugggcuugcgcugga

SEQ ID NO: 1833 - RNA, 25 nt, Artificial Sequence
  Description of Artificial Sequence: Synthetic oligonucleotide
agggcucuggacucccguuugcgcc

SEQ ID NO: 1834 - RNA, 25 nt, Artificial Sequence
  Description of Artificial Sequence: Synthetic oligonucleotide
caguggccugcauccugguccuguc

SEQ ID NO: 1835 - RNA, 25 nt, Artificial Sequence
  Description of Artificial Sequence: Synthetic oligonucleotide
cuuccucauguuugaauuucuuugc

SEQ ID NO: 1836 - RNA, 25 nt, Artificial Sequence
  Description of Artificial Sequence: Synthetic oligonucleotide
cuuuccuagucuggggagcagggag

SEQ ID NO: 1837 - RNA, 25 nt, Artificial Sequence
  Description of Artificial Sequence: Synthetic oligonucleotide
ggagcccugugcccugucccaggau

SEQ ID NO: 1838 - RNA, 25 nt, Artificial Sequence
  Description of Artificial Sequence: Synthetic oligonucleotide
uccauggguaggaacaccauggaca

SEQ ID NO: 1839 - RNA, 25 nt, Artificial Sequence
  Description of Artificial Sequence: Synthetic oligonucleotide
agggagagcaaacggggccaucugu

SEQ ID NO: 1840 - RNA, 25 nt, Artificial Sequence
  Description of Artificial Sequence: Synthetic oligonucleotide
ucaccaggggcuuagggaaggccga

SEQ ID NO: 1841 - RNA, 25 nt, Artificial Sequence
  Description of Artificial Sequence: Synthetic oligonucleotide
agccagccugggucaaagaagucaa

SEQ ID NO: 1842 - RNA, 25 nt, Artificial Sequence
  Description of Artificial Sequence: Synthetic oligonucleotide
aaggggcugccuggaggaggcagcc

SEQ ID NO: 1843 - RNA, 25 nt, Artificial Sequence
  Description of Artificial Sequence: Synthetic oligonucleotide
cugucagcuggugcaucagaggcug

SEQ ID NO: 1844 - RNA, 25 nt, Artificial Sequence
  Description of Artificial Sequence: Synthetic oligonucleotide
guggccaggccagcugggcucgggg

SEQ ID NO: 1845 - RNA, 25 nt, Artificial Sequence
  Description of Artificial Sequence: Synthetic oligonucleotide
gagcgccagccugagaggagcgcgu

SEQ ID NO: 1846 - RNA, 25 nt, Artificial Sequence
  Description of Artificial Sequence: Synthetic oligonucleotide
ugagcgucgcgggagccucgggcac

SEQ ID NO: 1847 - RNA, 25 nt, Artificial Sequence
  Description of Artificial Sequence: Synthetic oligonucleotide
ccaugagcgacguggcuauugugaa

SEQ ID NO: 1848 - RNA, 25 nt, Artificial Sequence
  Description of Artificial Sequence: Synthetic oligonucleotide
aggaggguuggcugcacaaacgagg

SEQ ID NO: 1849 - RNA, 25 nt, Artificial Sequence
  Description of Artificial Sequence: Synthetic oligonucleotide
gggaguacaucaagaccuggcggcc

SEQ ID NO: 1850 - RNA, 25 nt, Artificial Sequence
  Description of Artificial Sequence: Synthetic oligonucleotide
cacgcuacuuccuccucaagaauga

SEQ ID NO: 1851 - RNA, 25 nt, Artificial Sequence
  Description of Artificial Sequence: Synthetic oligonucleotide
auggcaccuucauuggcuacaagga

SEQ ID NO: 1852 - RNA, 25 nt, Artificial Sequence
  Description of Artificial Sequence: Synthetic oligonucleotide
agcggccgcaggauguggaccaacg

SEQ ID NO: 1853 - RNA, 25 nt, Artificial Sequence
  Description of Artificial Sequence: Synthetic oligonucleotide
gugaggcuccccucaacaacuucuc

SEQ ID NO: 1854 - RNA, 25 nt, Artificial Sequence
  Description of Artificial Sequence: Synthetic oligonucleotide
cuguggcgcagugccagcugaugaa

SEQ ID NO: 1855 - RNA, 25 nt, Artificial Sequence
  Description of Artificial Sequence: Synthetic oligonucleotide
agacggagcggccccggcccaacac

SEQ ID NO: 1856 - RNA, 25 nt, Artificial Sequence
  Description of Artificial Sequence: Synthetic oligonucleotide
ccuucaucauccgcugccugcagug

SEQ ID NO: 1857 - RNA, 25 nt, Artificial Sequence
  Description of Artificial Sequence: Synthetic oligonucleotide
ggaccacugucaucgaacgcaccuu

SEQ ID NO: 1858 - RNA, 25 nt, Artificial Sequence
  Description of Artificial Sequence: Synthetic oligonucleotide
uccauguggagacuccugaggagcg

SEQ ID NO: 1859 - RNA, 25 nt, Artificial Sequence
  Description of Artificial Sequence: Synthetic oligonucleotide
gggaggaguggacaaccgccaucca

SEQ ID NO: 1860 - RNA, 25 nt, Artificial Sequence
  Description of Artificial Sequence: Synthetic oligonucleotide
agacuguggcugacggccucaagaa

SEQ ID NO: 1861 - RNA, 25 nt, Artificial Sequence
  Description of Artificial Sequence: Synthetic oligonucleotide
agcaggaggaggaggagauggacuu

SEQ ID NO: 1862 - RNA, 25 nt, Artificial Sequence
  Description of Artificial Sequence: Synthetic oligonucleotide
uccggucgggcucacccagugacaa

SEQ ID NO: 1863 - RNA, 25 nt, Artificial Sequence
  Description of Artificial Sequence: Synthetic oligonucleotide
acucaggggcugaagagauggaggu

SEQ ID NO: 1864 - RNA, 25 nt, Artificial Sequence
  Description of Artificial Sequence: Synthetic oligonucleotide
ugucccuggccaagcccaagcaccg

SEQ ID NO: 1865 - RNA, 25 nt, Artificial Sequence
  Description of Artificial Sequence: Synthetic oligonucleotide
gcgugaccaugaacgaguuugagua

SEQ ID NO: 1866 - RNA, 25 nt, Artificial Sequence
  Description of Artificial Sequence: Synthetic oligonucleotide
accugaagcugcugggcaagggcac

SEQ ID NO: 1867 - RNA, 25 nt, Artificial Sequence
  Description of Artificial Sequence: Synthetic oligonucleotide
cuuucggcaaggugauccuggugaa

SEQ ID NO: 1868 - RNA, 25 nt, Artificial Sequence
  Description of Artificial Sequence: Synthetic oligonucleotide
aggagaaggccacaggccgcuacua

SEQ ID NO: 1869 - RNA, 25 nt, Artificial Sequence
  Description of Artificial Sequence: Synthetic oligonucleotide
acgccaugaagauccucaagaagga

SEQ ID NO: 1870 - RNA, 25 nt, Artificial Sequence
  Description of Artificial Sequence: Synthetic oligonucleotide
aagucaucguggccaaggacgaggu

SEQ ID NO: 1871 - RNA, 25 nt, Artificial Sequence
  Description of Artificial Sequence: Synthetic oligonucleotide
uggcccacacacucaccgagaaccg

SEQ ID NO: 1872 - RNA, 25 nt, Artificial Sequence
  Description of Artificial Sequence: Synthetic oligonucleotide
gcguccugcagaacuccaggcaccc

SEQ ID NO: 1873 - RNA, 25 nt, Artificial Sequence
  Description of Artificial Sequence: Synthetic oligonucleotide
ccuuccucacagcccugaaguacuc

SEQ ID NO: 1874 - RNA, 25 nt, Artificial Sequence
  Description of Artificial Sequence: Synthetic oligonucleotide
cuuuccagacccacgaccgccucug

SEQ ID NO: 1875 - RNA, 25 nt, Artificial Sequence
  Description of Artificial Sequence: Synthetic oligonucleotide
gcuuugucauggaguacgccaacgg

SEQ ID NO: 1876 - RNA, 25 nt, Artificial Sequence
  Description of Artificial Sequence: Synthetic oligonucleotide
ggggcgagcuguucuuccaccuguc

SEQ ID NO: 1877 - RNA, 25 nt, Artificial Sequence
  Description of Artificial Sequence: Synthetic oligonucleotide
cccgggagcguguguucuccgagga

SEQ ID NO: 1878 - RNA, 25 nt, Artificial Sequence
  Description of Artificial Sequence: Synthetic oligonucleotide
accgggcccgcuucuauggcgcuga

SEQ ID NO: 1879 - RNA, 25 nt, Artificial Sequence
  Description of Artificial Sequence: Synthetic oligonucleotide
agauugugucagcccuggacuaccu

SEQ ID NO: 1880 - RNA, 25 nt, Artificial Sequence
  Description of Artificial Sequence: Synthetic oligonucleotide
ugcacucggagaagaacguggugua

SEQ ID NO: 1881 - RNA, 25 nt, Artificial Sequence
  Description of Artificial Sequence: Synthetic oligonucleotide
accgggaccucaagcuggagaaccu

SEQ ID NO: 1882 - RNA, 25 nt, Artificial Sequence
  Description of Artificial Sequence: Synthetic oligonucleotide
ucaugcuggacaaggacgggcacau

SEQ ID NO: 1883 - RNA, 25 nt, Artificial Sequence
  Description of Artificial Sequence: Synthetic oligonucleotide
uuaagaucacagacuucgggcugug

SEQ ID NO: 1884 - RNA, 25 nt, Artificial Sequence
  Description of Artificial Sequence: Synthetic oligonucleotide
gcaaggaggggaucaaggacggugc

SEQ ID NO: 1885 - RNA, 25 nt, Artificial Sequence
  Description of Artificial Sequence: Synthetic oligonucleotide
ccaccaugaagaccuuuugcggcac

SEQ ID NO: 1886 - RNA, 25 nt, Artificial Sequence
  Description of Artificial Sequence: Synthetic oligonucleotide
caccugaguaccuggcccccgaggu

SEQ ID NO: 1887 - RNA, 25 nt, Artificial Sequence
  Description of Artificial Sequence: Synthetic oligonucleotide
ugcuggaggacaaugacuacggccg

SEQ ID NO: 1888 - RNA, 25 nt, Artificial Sequence
  Description of Artificial Sequence: Synthetic oligonucleotide
gugcaguggacuggugggggcuggg

SEQ ID NO: 1889 - RNA, 25 nt, Artificial Sequence
  Description of Artificial Sequence: Synthetic oligonucleotide
gcguggucauguacgagaugaugug

SEQ ID NO: 1890 - RNA, 25 nt, Artificial Sequence
  Description of Artificial Sequence: Synthetic oligonucleotide
gcggucgccugcccuucuacaacca

SEQ ID NO: 1891 - RNA, 25 nt, Artificial Sequence
  Description of Artificial Sequence: Synthetic oligonucleotide
aggaccaugagaagcuuuuugagcu

SEQ ID NO: 1892 - RNA, 25 nt, Artificial Sequence
  Description of Artificial Sequence: Synthetic oligonucleotide
ucauccucauggaggagauccgcuu

SEQ ID NO: 1893 - RNA, 25 nt, Artificial Sequence
  Description of Artificial Sequence: Synthetic oligonucleotide
ucccgcgcacgcuuggucccgaggc

SEQ ID NO: 1894 - RNA, 25 nt, Artificial Sequence
  Description of Artificial Sequence: Synthetic oligonucleotide
ccaaguccuugcuuucagggcugcu

SEQ ID NO: 1895 - RNA, 25 nt, Artificial Sequence
  Description of Artificial Sequence: Synthetic oligonucleotide
ucaagaaggaccccaagcagaggcu

SEQ ID NO: 1896 - RNA, 25 nt, Artificial Sequence
  Description of Artificial Sequence: Synthetic oligonucleotide
uuggcgggggcuccgaggacgccaa

SEQ ID NO: 1897 - RNA, 25 nt, Artificial Sequence
  Description of Artificial Sequence: Synthetic oligonucleotide
aggagaucaugcagcaucgcuucuu

SEQ ID NO: 1898 - RNA, 25 nt, Artificial Sequence
  Description of Artificial Sequence: Synthetic oligonucleotide
uugccgguaucguguggcagcacgu

SEQ ID NO: 1899 - RNA, 25 nt, Artificial Sequence
  Description of Artificial Sequence: Synthetic oligonucleotide
uguacgagaagaagcucagcccacc

SEQ ID NO: 1900 - RNA, 25 nt, Artificial Sequence
  Description of Artificial Sequence: Synthetic oligonucleotide
ccuucaagccccaggucacgucgga

SEQ ID NO: 1901 - RNA, 25 nt, Artificial Sequence
  Description of Artificial Sequence: Synthetic oligonucleotide
agacugacaccagguauuuugauga

SEQ ID NO: 1902 - RNA, 25 nt, Artificial Sequence
  Description of Artificial Sequence: Synthetic oligonucleotide
aggaguucacggcccagaugaucac

SEQ ID NO: 1903 - RNA, 25 nt, Artificial Sequence
  Description of Artificial Sequence: Synthetic oligonucleotide
ccaucacaccaccugaccaagauga

SEQ ID NO: 1904 - RNA, 25 nt, Artificial Sequence
  Description of Artificial Sequence: Synthetic oligonucleotide
acagcauggaguguguggacagcga

SEQ ID NO: 1905 - RNA, 25 nt, Artificial Sequence
  Description of Artificial Sequence: Synthetic oligonucleotide
agcgcaggccccacuucccccaguu

SEQ ID NO: 1906 - RNA, 25 nt, Artificial Sequence
  Description of Artificial Sequence: Synthetic oligonucleotide
ucuccuacucggccagcggcacggc

SEQ ID NO: 1907 - RNA, 25 nt, Artificial Sequence
  Description of Artificial Sequence: Synthetic oligonucleotide
ccugaggcggcgguggacugcgcug

SEQ ID NO: 1908 - RNA, 25 nt, Artificial Sequence
  Description of Artificial Sequence: Synthetic oligonucleotide
ggacgauagcuuggagggauggaga

SEQ ID NO: 1909 - RNA, 25 nt, Artificial Sequence
  Description of Artificial Sequence: Synthetic oligonucleotide
aggcggccucgugccaugaucugua

SEQ ID NO: 1910 - RNA, 25 nt, Artificial Sequence
  Description of Artificial Sequence: Synthetic oligonucleotide
auuuaaugguuuuuauuucucgggu

SEQ ID NO: 1911 - RNA, 25 nt, Artificial Sequence
  Description of Artificial Sequence: Synthetic oligonucleotide
ugcauuugagagaagccacgcuguc

SEQ ID NO: 1912 - RNA, 25 nt, Artificial Sequence
  Description of Artificial Sequence: Synthetic oligonucleotide
ccucucgagcccagauggaaagacg

SEQ ID NO: 1913 - RNA, 25 nt, Artificial Sequence
  Description of Artificial Sequence: Synthetic oligonucleotide
guuuuugugcugugggcagcacccu

SEQ ID NO: 1914 - RNA, 25 nt, Artificial Sequence
  Description of Artificial Sequence: Synthetic oligonucleotide
ucccccgcagcgggguagggaagaa

SEQ ID NO: 1915 - RNA, 25 nt, Artificial Sequence
  Description of Artificial Sequence: Synthetic oligonucleotide
aaacuauccugcggguuuuaauuua

SEQ ID NO: 1916 - RNA, 25 nt, Artificial Sequence
  Description of Artificial Sequence: Synthetic oligonucleotide
auuucauccaguuuguucuccgggu

SEQ ID NO: 1917 - RNA, 25 nt, Artificial Sequence
  Description of Artificial Sequence: Synthetic oligonucleotide
uguggccucagcccucagaacaauc

SEQ ID NO: 1918 - RNA, 25 nt, Artificial Sequence
  Description of Artificial Sequence: Synthetic oligonucleotide
ccgauucacguagggaaauguuaag

SEQ ID NO: 1919 - RNA, 25 nt, Artificial Sequence
  Description of Artificial Sequence: Synthetic oligonucleotide
ggacuucugcagcuaugcgcaaugu

SEQ ID NO: 1920 - RNA, 25 nt, Artificial Sequence
  Description of Artificial Sequence: Synthetic oligonucleotide
uggcauuggggggccgggcaggucc

SEQ ID NO: 1921 - RNA, 25 nt, Artificial Sequence
  Description of Artificial Sequence: Synthetic oligonucleotide
cugcccauguguccccucacucugu

SEQ ID NO: 1922 - RNA, 25 nt, Artificial Sequence
  Description of Artificial Sequence: Synthetic oligonucleotide
ucagccagccgcccugggcugucug

SEQ ID NO: 1923 - RNA, 25 nt, Artificial Sequence
  Description of Artificial Sequence: Synthetic oligonucleotide
gucaccagcuaucugucaucucucu

SEQ ID NO: 1924 - RNA, 25 nt, Artificial Sequence
  Description of Artificial Sequence: Synthetic oligonucleotide
uggggcccugggccucaguucaacc

SEQ ID NO: 1925 - RNA, 25 nt, Artificial Sequence
  Description of Artificial Sequence: Synthetic oligonucleotide
cugguggcaccagaugcaaccucac

SEQ ID NO: 1926 - RNA, 25 nt, Artificial Sequence
  Description of Artificial Sequence: Synthetic oligonucleotide
cuaugguaugcuggccagcacccuc

SEQ ID NO: 1927 - RNA, 25 nt, Artificial Sequence
  Description of Artificial Sequence: Synthetic oligonucleotide
cuccuggggguggcaggcacacagc

SEQ ID NO: 1928 - RNA, 25 nt, Artificial Sequence
  Description of Artificial Sequence: Synthetic oligonucleotide
cagccccccagcacuaaggccgugu

SEQ ID NO: 1929 - RNA, 25 nt, Artificial Sequence
  Description of Artificial Sequence: Synthetic oligonucleotide
ucucugaggacgucaucggaggcug

SEQ ID NO: 1930 - RNA, 25 nt, Artificial Sequence
  Description of Artificial Sequence: Synthetic oligonucleotide
gggccccugggaugggaccagggau

SEQ ID NO: 1931 - RNA, 25 nt, Artificial Sequence
  Description of Artificial Sequence: Synthetic oligonucleotide
ugggggaugggccaggguuuaccca

SEQ ID NO: 1932 - RNA, 25 nt, Artificial Sequence
  Description of Artificial Sequence: Synthetic oligonucleotide
agugggacagaggagcaagguuuaa

SEQ ID NO: 1933 - RNA, 25 nt, Artificial Sequence
  Description of Artificial Sequence: Synthetic oligonucleotide
aauuuguuauuguguauuauguugu

SEQ ID NO: 1934 - RNA, 25 nt, Artificial Sequence
  Description of Artificial Sequence: Synthetic oligonucleotide
uucaaaugcauuuuggggguuuuua

SEQ ID NO: 1935 - RNA, 25 nt, Artificial Sequence
  Description of Artificial Sequence: Synthetic oligonucleotide
aaucuuugugacaggaaagcccucc

SEQ ID NO: 1936 - RNA, 25 nt, Artificial Sequence
  Description of Artificial Sequence: Synthetic oligonucleotide
ccccuuccccuucugugucacaguu

SEQ ID NO: 1937 - RNA, 25 nt, Artificial Sequence
  Description of Artificial Sequence: Synthetic oligonucleotide
ucuuggugacugucccaccgggagc

SEQ ID NO: 1938 - RNA, 25 nt, Artificial Sequence
  Description of Artificial Sequence: Synthetic oligonucleotide
ccucccccucagaugaucucuccac

SEQ ID NO: 1939 - RNA, 25 nt, Artificial Sequence
  Description of Artificial Sequence: Synthetic oligonucleotide
cgguagcacuugaccuuuucgacgc

SEQ ID NO: 1940 - RNA, 25 nt, Artificial Sequence
  Description of Artificial Sequence: Synthetic oligonucleotide
cuuaaccuuuccgcugucgccccag

SEQ ID NO: 1941 - RNA, 25 nt, Artificial Sequence
  Description of Artificial Sequence: Synthetic oligonucleotide
ggcccucccugacucccuguggggg

SEQ ID NO: 1942 - RNA, 25 nt, Artificial Sequence
  Description of Artificial Sequence: Synthetic oligonucleotide
guggccaucccugggccccuccacg

SEQ ID NO: 1943 - RNA, 25 nt, Artificial Sequence
  Description of Artificial Sequence: Synthetic oligonucleotide
gccuccuggccagacgcugccgcug

SEQ ID NO: 1944 - RNA, 25 nt, Artificial Sequence
  Description of Artificial Sequence: Synthetic oligonucleotide
gccgcugcaccacggcguuuuuuua

SEQ ID NO: 1945 - RNA, 25 nt, Artificial Sequence
  Description of Artificial Sequence: Synthetic oligonucleotide
acaacauucaacuuuaguauuuuua

SEQ ID NO: 1946 - RNA, 25 nt, Artificial Sequence
  Description of Artificial Sequence: Synthetic oligonucleotide
acuauuauaauauaauauggaaccu

SEQ ID NO: 1947 - RNA, 25 nt, Artificial Sequence
  Description of Artificial Sequence: Synthetic oligonucleotide
uucccuccaaauucuucaauaaaag

SEQ ID NO: 1948 - RNA, 5263 nt, Homo sapiens
cggggggggccgcgccgugcuagccguugggccugccucggaggaggcgucgccgccgccgcugccgcugccggcgccguugccgcugccgggaaacacaaggaaagggaaccagcgcagcguggcgaugggcggggguagagccccgccggagaggcugggcggcugccggugacagacugugcccuguccacggugccuccugcauguccugcugcccugagcugucccgagcuaggugacagcguaccacgcugccaccaugaaugaggugucugucaucaaagaaggcuggcuccacaagcguggugaauacaucaagaccuggaggccacgguacuuccugcugaagagcgacggcuccuucauuggguacaaggagaggcccgaggccccugaucagacucuaccccccuuaaacaacuucuccguagcagaaugccagcugaugaagaccgagaggccgcgacccaacaccuuugucauacgcugccugcaguggaccacagucaucgagaggaccuuccacguggauucuccagacgagagggaggaguggaugcgggccauccagauggucgccaacagccucaagcagcgggccccaggcgaggaccccauggacuacaaguguggcucccccagugacuccuccacgacugaggagauggaaguggcggucagcaaggcacgggcuaaagugaccaugaaugacuucgacuaucucaaacuccuuggcaagggaaccuuuggcaaagucauccuggugcgggagaaggccacuggccgcuacuacgccaugaagauccugcggaaggaagucaucauugccaaggaugaagucgcucacacagucaccgagagccggguccuccagaacaccaggcacccguuccucacugcgcugaaguaugccuuccagacccacgaccgccugugcuuugugauggaguaugccaacgggggugagcuguucuuccaccugucccgggagcgugucuucacagaggagcgggcccgguuuuauggugcagagauugucucggcucuugaguacuugcacucgcgggacgugguauaccgcgacaucaagcuggaaaaccucaugcuggacaaagauggccacaucaagaucacugacuuuggccucugcaaagagggcaucagugacggggccaccaugaaaaccuucugugggaccccggaguaccuggcgccugaggugcuggaggacaaugacuauggccgggccguggacuggugggggcuggguguggucauguacgagaugaugugcggccgccugcccuucuacaaccaggaccacgagcgccucuucgagcucauccucauggaagagauccgcuucccgcgcacgcucagccccgaggccaagucccugcuugcugggcugcuuaagaaggaccccaagcagaggcuugguggggggcccagcgaugccaaggaggucauggagcacagguucuuccucagcaucaacuggcaggacgugguccagaagaagcuccugccacccuucaaaccucaggucacguccgaggucgacacaagguacuucgaugaugaauuuaccgcccaguccaucacaaucacacccccugaccgcuaugacagccugggcuuacuggagcuggaccagcggacccacuucccccaguucuccuacucggccagcauccgcgagugagcagucugcccacgcagaggacgcacgcucgcugccaucaccgcugggugguuuuuucccccuaacuuuuuacuuagccuuuuugguuuguguccccacccccaccuccucacccccuuuccaguucuucuucaggccccucccagacgcaccccagcggccccugcagccccugccuccagccuccagccucaccuuugugcccagacucgcauuuggaagacuccaccucccgcccaggccugggcuguugggcgguuggagauucagguuuuaauccacacaagccccagugaggggugaagcauggcgccuggggccugccugaguuucuggccugggugucgugcuggugucugccuccgcgcugcugcaucuggacgaaggcugccuucuggugggacgcgacacccggcagacaguggugcugccuuccaggccccguggccuaggcucggaguggccaggcacggggcgguccaaucccccacccgcugucccccuaugggggcagaaaagcaauaauguccaggggcaggcaggggcccuugggagcugcagggcuggggguuagggcugcucccuggugaauggagucagauccuaggaucuguaccauggggaaccaggaguggccgggcugggugccgccuccugguccggccuccuccccaccaaacuguccucacccuauggaugaggcaggaggaacauuuggggccaaaccugccugccucccagccccgugccuuacuagggcuuccuuccagcuggccuuaccucccgcuggacccugggccuggccuggccccacugggggcuaugggcugggcucacccucuccucugcggggguggagggccaccagccuuggcuguuacaaucuuacaccggacaguauugggccccauggacuuggucagggaggggugggggugggcaucucugguaccuauugggguggggggccucugaaaagggaggcuccuaggccccccucaccccucccucuccccagggccccacguucugcagccuuaagguugaacaugagugcacguccaugucagugcugugggacuccugugcgugccucggacugcgugugucggcgggacgcaggcacacgugggugugugugcauguguguuugugugagggcagcguguccuccagugugcauggugugugggcuugggccccaucccuggcccgagcauuucauccugugggggaggggugcugaccuagugggaggagccccacugugauccaugagcugcccugcccacgccuccccucccuguagcaacaccucuggguguuuggaguuuagcuuuuguggguuugcucucccuaucccaucuccuguacuacacaguucauggcaggguggggaggggugggguugguucgggugggugagggucuuuuuccucugugugcgauguuguuaucugacaguucuccgucccuacuggccuuucuccucgucuucauauuuguacgguacaagcaauaaagacacucauuucagaccagggcccagccugcacucacgccagcccaaccacucugggcuuugccuuggugauggagucagaccccugggccccagcuccuccuguacuagccguucccuucagcaaggagggcacugagcucagggugagggcagcuggggugugugcaggagcucaggcuggagaggguggguggagcuggugcuguggggcugagggguaugggaaggcuccccgcaugugggggugggguggacagagaccacuccaggcccucagugcugcuuaggcuaagagaggugggguggagggacagggcuggaagaucuggguagcccagaaugaggagggugccugugcugucacugaaugagagggagugguucauuccacccggcugccgagccucagaggggggcauuccuauccugccccaccucccuguuuaugcugccaccuggaagccuugaggcccccaaauuccaguacagacccagugguguguucaugguggcgugguugcugucaccugggagcuccugagcguuugguuagaacccuguucagcuuggggucagcccuccccuagucacugcccuuuagccuggaugugucugggccccugcacuucccgugcuugagucacguggcugcauggccgggcgcuggccggauggaacaccucccccagcaagggaccagggaccagagcccuggccugcccugcugagcccugcugugcagagggccuggcacagaugaauuugagauuuugccgcaagguguuagcacuucacacccauugagucuuugagauuuuaagugaauguaagcagaaaaagucagauccaauuuacagaaaucagaguuagcuacagcuaggacucguuugguugggguuuuuuaguuugucuuucuaaagucauguggaccuuaauuuaauuacaaaagucuacccugguggucauaaaauaggcaggccuaugaagaaaggccuuuuacucuuccaucucaucccagccccgaguugacccacguugcugcuccucacaccauggugaugcaggucucguagugugggcacaggccuggcuaccucaucuuuuuagugccucucuccucuuccacaggauggggucccacagcugcagcagcuggccccguaguugagcaugugugguuauccuguagagcuuuucccaagaaggguguuugaacuuagagucuuaauaaaaucuuaccaaauaaauuuugaguagaauaaucgucuuuugcaauguacauuuuaaaaauuucacacauucuuuuuuguauauaaagaacagugacugggcacaguggcucaugccuguaaucccagcaauuugggaggccgaggcgggcgggucucuugaggccagggguucgagaccagccugggcaucauagggagaccuucaucucuacaaaaaauacaaaaauuagcugggcaugguggugcaugccugcaaucccagcuaacuuggaaggcugaggugaggugggaagaucacuugagcccaggaguuugaggcugcagugagcuaugauugcggcacugcacugcagccugggacaaugagacugugucucuaaaaauaaaaaaaaaaaaaacaugauacaugcuauuaaaaaagacagcaaagcaggaguauaagaaaggaaauucacccgaggucgcagggccuugaguacucauuuuggugcugauuaccucucugcaaauggacacggcaucauaaauugguaguuuccugcucuuuuuguguaaucuuuuccaguuaaugugaagccucugggggcugcccucgugcacugaugguuguguggagucgggggcggcagugcgauucccuuuuagcugcugcauggggggaacucaggcuuuccagcugcuuccugggguuccaugggguagaccccucaaccgcuucagcugccccguuaacaggaauugacuugguuucguuuggugcuaccagcaguccuguaauaaacuagcuauccaucugua

SEQ ID NO: 1949 - RNA, 19 nt, Artificial Sequence
  Description of Artificial Sequence: Synthetic oligonucleotide
cggggggggccgcgccgug

SEQ ID NO: 1950 - RNA, 19 nt, Artificial Sequence
  Description of Artificial Sequence: Synthetic oligonucleotide
gcuagccguugggccugcc

SEQ ID NO: 1951 - RNA, 19 nt, Artificial Sequence
  Description of Artificial Sequence: Synthetic oligonucleotide
cucggaggaggcgucgccg

SEQ ID NO: 1952 - RNA, 19 nt, Artificial Sequence
  Description of Artificial Sequence: Synthetic oligonucleotide
gccgccgcugccgcugccg

SEQ ID NO: 1953 - RNA, 19 nt, Artificial Sequence
  Description of Artificial Sequence: Synthetic oligonucleotide
ggcgccguugccgcugccg

SEQ ID NO: 1954 - RNA, 19 nt, Artificial Sequence
  Description of Artificial Sequence: Synthetic oligonucleotide
gggaaacacaaggaaaggg

SEQ ID NO: 1955 - RNA, 19 nt, Artificial Sequence
  Description of Artificial Sequence: Synthetic oligonucleotide
gaaccagcgcagcguggcg

SEQ ID NO: 1956 - RNA, 19 nt, Artificial Sequence
  Description of Artificial Sequence: Synthetic oligonucleotide
gaugggcggggguagagcc

SEQ ID NO: 1957 - RNA, 19 nt, Artificial Sequence
  Description of Artificial Sequence: Synthetic oligonucleotide
cccgccggagaggcugggc

SEQ ID NO: 1958 - RNA, 19 nt, Artificial Sequence
  Description of Artificial Sequence: Synthetic oligonucleotide
cggcugccggugacagacu

SEQ ID NO: 1959 - RNA, 19 nt, Artificial Sequence
  Description of Artificial Sequence: Synthetic oligonucleotide
ugugcccuguccacggugc

SEQ ID NO: 1960 - RNA, 19 nt, Artificial Sequence
  Description of Artificial Sequence: Synthetic oligonucleotide
ccuccugcauguccugcug

SEQ ID NO: 1961 - RNA, 19 nt, Artificial Sequence
  Description of Artificial Sequence: Synthetic oligonucleotide
gcccugagcugucccgagc

SEQ ID NO: 1962 - RNA, 19 nt, Artificial Sequence
  Description of Artificial Sequence: Synthetic oligonucleotide
cuaggugacagcguaccac

SEQ ID NO: 1963 - RNA, 19 nt, Artificial Sequence
  Description of Artificial Sequence: Synthetic oligonucleotide
cgcugccaccaugaaugag

SEQ ID NO: 1964 - RNA, 19 nt, Artificial Sequence
  Description of Artificial Sequence: Synthetic oligonucleotide
ggugucugucaucaaagaa

SEQ ID NO: 1965 - RNA, 19 nt, Artificial Sequence
  Description of Artificial Sequence: Synthetic oligonucleotide
aggcuggcuccacaagcgu

SEQ ID NO: 1966 - RNA, 19 nt, Artificial Sequence
  Description of Artificial Sequence: Synthetic oligonucleotide
uggugaauacaucaagacc

SEQ ID NO: 1967 - RNA, 19 nt, Artificial Sequence
  Description of Artificial Sequence: Synthetic oligonucleotide
cuggaggccacgguacuuc

SEQ ID NO: 1968 - RNA, 19 nt, Artificial Sequence
  Description of Artificial Sequence: Synthetic oligonucleotide
ccugcugaagagcgacggc

SEQ ID NO: 1969 - RNA, 19 nt, Artificial Sequence
  Description of Artificial Sequence: Synthetic oligonucleotide
cuccuucauuggguacaag

SEQ ID NO: 1970 - RNA, 19 nt, Artificial Sequence
  Description of Artificial Sequence: Synthetic oligonucleotide
ggagaggcccgaggccccu

SEQ ID NO: 1971 - RNA, 19 nt, Artificial Sequence
  Description of Artificial Sequence: Synthetic oligonucleotide
ugaucagacucuacccccc

SEQ ID NO: 1972 - RNA, 19 nt, Artificial Sequence
  Description of Artificial Sequence: Synthetic oligonucleotide
cuuaaacaacuucuccgua

SEQ ID NO: 1973 - RNA, 19 nt, Artificial Sequence
  Description of Artificial Sequence: Synthetic oligonucleotide
agcagaaugccagcugaug

SEQ ID NO: 1974 - RNA, 19 nt, Artificial Sequence
  Description of Artificial Sequence: Synthetic oligonucleotide
gaagaccgagaggccgcga

SEQ ID NO: 1975 - RNA, 19 nt, Artificial Sequence
  Description of Artificial Sequence: Synthetic oligonucleotide
acccaacaccuuugucaua

SEQ ID NO: 1976 - RNA, 19 nt, Artificial Sequence
  Description of Artificial Sequence: Synthetic oligonucleotide
acgcugccugcaguggacc

SEQ ID NO: 1977 - RNA, 19 nt, Artificial Sequence
  Description of Artificial Sequence: Synthetic oligonucleotide
cacagucaucgagaggacc

SEQ ID NO: 1978 - RNA, 19 nt, Artificial Sequence
  Description of Artificial Sequence: Synthetic oligonucleotide
cuuccacguggauucucca

SEQ ID NO: 1979 - RNA, 19 nt, Artificial Sequence
  Description of Artificial Sequence: Synthetic oligonucleotide
agacgagagggaggagugg

SEQ ID NO: 1980 - RNA, 19 nt, Artificial Sequence
  Description of Artificial Sequence: Synthetic oligonucleotide
gaugcgggccauccagaug

SEQ ID NO: 1981 - RNA, 19 nt, Artificial Sequence
  Description of Artificial Sequence: Synthetic oligonucleotide
ggucgccaacagccucaag

SEQ ID NO: 1982 - RNA, 19 nt, Artificial Sequence
  Description of Artificial Sequence: Synthetic oligonucleotide
gcagcgggccccaggcgag

SEQ ID NO: 1983 - RNA, 19 nt, Artificial Sequence
  Description of Artificial Sequence: Synthetic oligonucleotide
ggaccccauggacuacaag

SEQ ID NO: 1984 - RNA, 19 nt, Artificial Sequence
  Description of Artificial Sequence: Synthetic oligonucleotide
guguggcucccccagugac

SEQ ID NO: 1985 - RNA, 19 nt, Artificial Sequence
  Description of Artificial Sequence: Synthetic oligonucleotide
cuccuccacgacugaggag

SEQ ID NO: 1986 - RNA, 19 nt, Artificial Sequence
  Description of Artificial Sequence: Synthetic oligonucleotide
gauggaaguggcggucagc

SEQ ID NO: 1987 - RNA, 19 nt, Artificial Sequence
  Description of Artificial Sequence: Synthetic oligonucleotide
caaggcacgggcuaaagug

SEQ ID NO: 1988 - RNA, 19 nt, Artificial Sequence
  Description of Artificial Sequence: Synthetic oligonucleotide
gaccaugaaugacuucgac

SEQ ID NO: 1989 - RNA, 19 nt, Artificial Sequence
  Description of Artificial Sequence: Synthetic oligonucleotide
cuaucucaaacuccuuggc

SEQ ID NO: 1990 - RNA, 19 nt, Artificial Sequence
  Description of Artificial Sequence: Synthetic oligonucleotide
caagggaaccuuuggcaaa

SEQ ID NO: 1991 - RNA, 19 nt, Artificial Sequence
  Description of Artificial Sequence: Synthetic oligonucleotide
agucauccuggugcgggag

SEQ ID NO: 1992 - RNA, 19 nt, Artificial Sequence
  Description of Artificial Sequence: Synthetic oligonucleotide
gaaggccacuggccgcuac

SEQ ID NO: 1993 - RNA, 19 nt, Artificial Sequence
  Description of Artificial Sequence: Synthetic oligonucleotide
cuacgccaugaagauccug

SEQ ID NO: 1994 - RNA, 19 nt, Artificial Sequence
  Description of Artificial Sequence: Synthetic oligonucleotide
gcggaaggaagucaucauu

SEQ ID NO: 1995 - RNA, 19 nt, Artificial Sequence
  Description of Artificial Sequence: Synthetic oligonucleotide
ugccaaggaugaagucgcu

SEQ ID NO: 1996 - RNA, 19 nt, Artificial Sequence
  Description of Artificial Sequence: Synthetic oligonucleotide
ucacacagucaccgagagc

SEQ ID NO: 1997 - RNA, 19 nt, Artificial Sequence
  Description of Artificial Sequence: Synthetic oligonucleotide
ccggguccuccagaacacc

SEQ ID NO: 1998 - RNA, 19 nt, Artificial Sequence
  Description of Artificial Sequence: Synthetic oligonucleotide
caggcacccguuccucacu

SEQ ID NO: 1999 - RNA, 19 nt, Artificial Sequence
  Description of Artificial Sequence: Synthetic oligonucleotide
ugcgcugaaguaugccuuc

SEQ ID NO: 2000 - RNA, 19 nt, Artificial Sequence
  Description of Artificial Sequence: Synthetic oligonucleotide
ccagacccacgaccgccug

SEQ ID NO: 2001 - RNA, 19 nt, Artificial Sequence
  Description of Artificial Sequence: Synthetic oligonucleotide
gugcuuugugauggaguau

SEQ ID NO: 2002 - RNA, 19 nt, Artificial Sequence
  Description of Artificial Sequence: Synthetic oligonucleotide
ugccaacgggggugagcug

SEQ ID NO: 2003 - RNA, 19 nt, Artificial Sequence
  Description of Artificial Sequence: Synthetic oligonucleotide
ggagcgugucuucacagag

SEQ ID NO: 2004 - RNA, 19 nt, Artificial Sequence
  Description of Artificial Sequence: Synthetic oligonucleotide
ggagcgggcccgguuuuau

SEQ ID NO: 2005 - RNA, 19 nt, Artificial Sequence
  Description of Artificial Sequence: Synthetic oligonucleotide
uggugcagagauugucucg

SEQ ID NO: 2006 - RNA, 19 nt, Artificial Sequence
  Description of Artificial Sequence: Synthetic oligonucleotide
ggcucuugaguacuugcac

SEQ ID NO: 2007 - RNA, 19 nt, Artificial Sequence
  Description of Artificial Sequence: Synthetic oligonucleotide
cucgcgggacgugguauac

SEQ ID NO: 2008 - RNA, 19 nt, Artificial Sequence
  Description of Artificial Sequence: Synthetic oligonucleotide
ccgcgacaucaagcuggaa

SEQ ID NO: 2009 - RNA, 19 nt, Artificial Sequence
  Description of Artificial Sequence: Synthetic oligonucleotide
aaaccucaugcuggacaaa

SEQ ID NO: 2010 - RNA, 19 nt, Artificial Sequence
  Description of Artificial Sequence: Synthetic oligonucleotide
agauggccacaucaagauc

SEQ ID NO: 2011 - RNA, 19 nt, Artificial Sequence
  Description of Artificial Sequence: Synthetic oligonucleotide
cacugacuuuggccucugc

SEQ ID NO: 2012 - RNA, 19 nt, Artificial Sequence
  Description of Artificial Sequence: Synthetic oligonucleotide
caaagagggcaucagugac

SEQ ID NO: 2013 - RNA, 19 nt, Artificial Sequence
  Description of Artificial Sequence: Synthetic oligonucleotide
cggggccaccaugaaaacc

SEQ ID NO: 2014 - RNA, 19 nt, Artificial Sequence
  Description of Artificial Sequence: Synthetic oligonucleotide
cuucugugggaccccggag

SEQ ID NO: 2015 - RNA, 19 nt, Artificial Sequence
  Description of Artificial Sequence: Synthetic oligonucleotide
guaccuggcgccugaggug

SEQ ID NO: 2016 - RNA, 19 nt, Artificial Sequence
  Description of Artificial Sequence: Synthetic oligonucleotide
gcuggaggacaaugacuau

SEQ ID NO: 2017 - RNA, 19 nt, Artificial Sequence
  Description of Artificial Sequence: Synthetic oligonucleotide
uggccgggccguggacugg

SEQ ID NO: 2018 - RNA, 19 nt, Artificial Sequence
  Description of Artificial Sequence: Synthetic oligonucleotide
gugggggcugggugugguc

SEQ ID NO: 2019 - RNA, 19 nt, Artificial Sequence
  Description of Artificial Sequence: Synthetic oligonucleotide
cauguacgagaugaugugc

SEQ ID NO: 2020 - RNA, 19 nt, Artificial Sequence
  Description of Artificial Sequence: Synthetic oligonucleotide
cggccgccugcccuucuac

SEQ ID NO: 2021 - RNA, 19 nt, Artificial Sequence
  Description of Artificial Sequence: Synthetic oligonucleotide
caaccaggaccacgagcgc

SEQ ID NO: 2022 - RNA, 19 nt, Artificial Sequence
  Description of Artificial Sequence: Synthetic oligonucleotide
ccucuucgagcucauccuc

SEQ ID NO: 2023 - RNA, 19 nt, Artificial Sequence
  Description of Artificial Sequence: Synthetic oligonucleotide
cauggaagagauccgcuuc

SEQ ID NO: 2024 - RNA, 19 nt, Artificial Sequence
  Description of Artificial Sequence: Synthetic oligonucleotide
cccgcgcacgcucagcccc

SEQ ID NO: 2025 - RNA, 19 nt, Artificial Sequence
  Description of Artificial Sequence: Synthetic oligonucleotide
cgaggccaagucccugcuu

SEQ ID NO: 2026 - RNA, 19 nt, Artificial Sequence
  Description of Artificial Sequence: Synthetic oligonucleotide
ugcugggcugcuuaagaag

SEQ ID NO: 2027 - RNA, 19 nt, Artificial Sequence
  Description of Artificial Sequence: Synthetic oligonucleotide
ggaccccaagcagaggcuu

SEQ ID NO: 2028 - RNA, 19 nt, Artificial Sequence
  Description of Artificial Sequence: Synthetic oligonucleotide
ugguggggggcccagcgau

SEQ ID NO: 2029 - RNA, 19 nt, Artificial Sequence
  Description of Artificial Sequence: Synthetic oligonucleotide
ugccaaggaggucauggag

SEQ ID NO: 2030 - RNA, 19 nt, Artificial Sequence
  Description of Artificial Sequence: Synthetic oligonucleotide
gcacagguucuuccucagc

SEQ ID NO: 2031 - RNA, 19 nt, Artificial Sequence
  Description of Artificial Sequence: Synthetic oligonucleotide
caucaacuggcaggacgug

SEQ ID NO: 2032 - RNA, 19 nt, Artificial Sequence
  Description of Artificial Sequence: Synthetic oligonucleotide
gguccagaagaagcuccug

SEQ ID NO: 2033 - RNA, 19 nt, Artificial Sequence
  Description of Artificial Sequence: Synthetic oligonucleotide
gccacccuucaaaccucag

SEQ ID NO: 2034 - RNA, 19 nt, Artificial Sequence
  Description of Artificial Sequence: Synthetic oligonucleotide
ggucacguccgaggucgac

SEQ ID NO: 2035 - RNA, 19 nt, Artificial Sequence
  Description of Artificial Sequence: Synthetic oligonucleotide
cacaagguacuucgaugau

SEQ ID NO: 2036 - RNA, 19 nt, Artificial Sequence
  Description of Artificial Sequence: Synthetic oligonucleotide
ugaauuuaccgcccagucc

SEQ ID NO: 2037 - RNA, 19 nt, Artificial Sequence
  Description of Artificial Sequence: Synthetic oligonucleotide
caucacaaucacacccccu

SEQ ID NO: 2038 - RNA, 19 nt, Artificial Sequence
  Description of Artificial Sequence: Synthetic oligonucleotide
ugaccgcuaugacagccug

SEQ ID NO: 2039 - RNA, 19 nt, Artificial Sequence
  Description of Artificial Sequence: Synthetic oligonucleotide
gggcuuacuggagcuggac

SEQ ID NO: 2040 - RNA, 19 nt, Artificial Sequence
  Description of Artificial Sequence: Synthetic oligonucleotide
ccagcggacccacuucccc

SEQ ID NO: 2041 - RNA, 19 nt, Artificial Sequence
  Description of Artificial Sequence: Synthetic oligonucleotide
ccaguucuccuacucggcc

SEQ ID NO: 2042 - RNA, 19 nt, Artificial Sequence
  Description of Artificial Sequence: Synthetic oligonucleotide
cagcauccgcgagugagca

SEQ ID NO: 2043 - RNA, 19 nt, Artificial Sequence
  Description of Artificial Sequence: Synthetic oligonucleotide
agucugcccacgcagagga

SEQ ID NO: 2044 - RNA, 19 nt, Artificial Sequence
  Description of Artificial Sequence: Synthetic oligonucleotide
acgcacgcucgcugccauc

SEQ ID NO: 2045 - RNA, 19 nt, Artificial Sequence
  Description of Artificial Sequence: Synthetic oligonucleotide
caccgcugggugguuuuuu

SEQ ID NO: 2046 - RNA, 19 nt, Artificial Sequence
  Description of Artificial Sequence: Synthetic oligonucleotide
ucccccuaacuuuuuacuu

SEQ ID NO: 2047 - RNA, 19 nt, Artificial Sequence
  Description of Artificial Sequence: Synthetic oligonucleotide
uagccuuuuugguuugugu

SEQ ID NO: 2048 - RNA, 19 nt, Artificial Sequence
  Description of Artificial Sequence: Synthetic oligonucleotide
uccccacccccaccuccuc

SEQ ID NO: 2049 - RNA, 19 nt, Artificial Sequence
  Description of Artificial Sequence: Synthetic oligonucleotide
cacccccuuuccaguucuu

SEQ ID NO: 2050 - RNA, 19 nt, Artificial Sequence
  Description of Artificial Sequence: Synthetic oligonucleotide
ucuucaggccccucccaga

SEQ ID NO: 2051 - RNA, 19 nt, Artificial Sequence
  Description of Artificial Sequence: Synthetic oligonucleotide
acgcaccccagcggccccu

SEQ ID NO: 2052 - RNA, 19 nt, Artificial Sequence
  Description of Artificial Sequence: Synthetic oligonucleotide
ugcagccccugccuccagc

SEQ ID NO: 2053 - RNA, 19 nt, Artificial Sequence
  Description of Artificial Sequence: Synthetic oligonucleotide
ccuccagccucaccuuugu

SEQ ID NO: 2054 - RNA, 19 nt, Artificial Sequence
  Description of Artificial Sequence: Synthetic oligonucleotide
ugcccagacucgcauuugg

SEQ ID NO: 2055 - RNA, 19 nt, Artificial Sequence
  Description of Artificial Sequence: Synthetic oligonucleotide
gaagacuccaccucccgcc

SEQ ID NO: 2056 - RNA, 19 nt, Artificial Sequence
  Description of Artificial Sequence: Synthetic oligonucleotide
ccaggccugggcuguuggg

SEQ ID NO: 2057 - RNA, 19 nt, Artificial Sequence
  Description of Artificial Sequence: Synthetic oligonucleotide
gcgguuggagauucagguu

SEQ ID NO: 2058 - RNA, 19 nt, Artificial Sequence
  Description of Artificial Sequence: Synthetic oligonucleotide
uuuaauccacacaagcccc

SEQ ID NO: 2059 - RNA, 19 nt, Artificial Sequence
  Description of Artificial Sequence: Synthetic oligonucleotide
cagugaggggugaagcaug

SEQ ID NO: 2060 - RNA, 19 nt, Artificial Sequence
  Description of Artificial Sequence: Synthetic oligonucleotide
ggcgccuggggccugccug

SEQ ID NO: 2061 - RNA, 19 nt, Artificial Sequence
  Description of Artificial Sequence: Synthetic oligonucleotide
gaguuucuggccugggugu

SEQ ID NO: 2062 - RNA, 19 nt, Artificial Sequence
  Description of Artificial Sequence: Synthetic oligonucleotide
ucgugcuggugucugccuc

SEQ ID NO: 2063 - RNA, 19 nt, Artificial Sequence
  Description of Artificial Sequence: Synthetic oligonucleotide
ccgcgcugcugcaucugga

SEQ ID NO: 2064 - RNA, 19 nt, Artificial Sequence
  Description of Artificial Sequence: Synthetic oligonucleotide
acgaaggcugccuucuggu

SEQ ID NO: 2065 - RNA, 19 nt, Artificial Sequence
  Description of Artificial Sequence: Synthetic oligonucleotide
ugggacgcgacacccggca

SEQ ID NO: 2066 - RNA, 19 nt, Artificial Sequence
  Description of Artificial Sequence: Synthetic oligonucleotide
agacaguggugcugccuuc

SEQ ID NO: 2067 - RNA, 19 nt, Artificial Sequence
  Description of Artificial Sequence: Synthetic oligonucleotide
ccaggccccguggccuagg

SEQ ID NO: 2068 - RNA, 19 nt, Artificial Sequence
  Description of Artificial Sequence: Synthetic oligonucleotide
gcucggaguggccaggcac

SEQ ID NO: 2069 - RNA, 19 nt, Artificial Sequence
  Description of Artificial Sequence: Synthetic oligonucleotide
cggggcgguccaauccccc

SEQ ID NO: 2070 - RNA, 19 nt, Artificial Sequence
  Description of Artificial Sequence: Synthetic oligonucleotide
cacccgcugucccccuaug

SEQ ID NO: 2071 - RNA, 19 nt, Artificial Sequence
  Description of Artificial Sequence: Synthetic oligonucleotide
gggggcagaaaagcaauaa

SEQ ID NO: 2072 - RNA, 19 nt, Artificial Sequence
  Description of Artificial Sequence: Synthetic oligonucleotide
auguccaggggcaggcagg

SEQ ID NO: 2073 - RNA, 19 nt, Artificial Sequence
  Description of Artificial Sequence: Synthetic oligonucleotide
gggcccuugggagcugcag

SEQ ID NO: 2074 - RNA, 19 nt, Artificial Sequence
  Description of Artificial Sequence: Synthetic oligonucleotide
gggcuggggguuagggcug

SEQ ID NO: 2075 - RNA, 19 nt, Artificial Sequence
  Description of Artificial Sequence: Synthetic oligonucleotide
gcucccuggugaauggagu

SEQ ID NO: 2076 - RNA, 19 nt, Artificial Sequence
  Description of Artificial Sequence: Synthetic oligonucleotide
ucagauccuaggaucugua

SEQ ID NO: 2077 - RNA, 19 nt, Artificial Sequence
  Description of Artificial Sequence: Synthetic oligonucleotide
accauggggaaccaggagu

SEQ ID NO: 2078 - RNA, 19 nt, Artificial Sequence
  Description of Artificial Sequence: Synthetic oligonucleotide
uggccgggcugggugccgc

SEQ ID NO: 2079 - RNA, 19 nt, Artificial Sequence
  Description of Artificial Sequence: Synthetic oligonucleotide
ccuccugguccggccuccu

SEQ ID NO: 2080 - RNA, 19 nt, Artificial Sequence
  Description of Artificial Sequence: Synthetic oligonucleotide
uccccaccaaacuguccuc

SEQ ID NO: 2081 - RNA, 19 nt, Artificial Sequence
  Description of Artificial Sequence: Synthetic oligonucleotide
cacccuauggaugaggcag

SEQ ID NO: 2082 - RNA, 19 nt, Artificial Sequence
  Description of Artificial Sequence: Synthetic oligonucleotide
ggaggaacauuuggggcca

SEQ ID NO: 2083 - RNA, 19 nt, Artificial Sequence
  Description of Artificial Sequence: Synthetic oligonucleotide
aaaccugccugccucccag

SEQ ID NO: 2084 - RNA, 19 nt, Artificial Sequence
  Description of Artificial Sequence: Synthetic oligonucleotide
gccccgugccuuacuaggg

SEQ ID NO: 2085 - RNA, 19 nt, Artificial Sequence
  Description of Artificial Sequence: Synthetic oligonucleotide
gcuuccuuccagcuggccu

SEQ ID NO: 2086 - RNA, 19 nt, Artificial Sequence
  Description of Artificial Sequence: Synthetic oligonucleotide
uuaccucccgcuggacccu

SEQ ID NO: 2087 - RNA, 19 nt, Artificial Sequence
  Description of Artificial Sequence: Synthetic oligonucleotide
ugggccuggccuggcccca

SEQ ID NO: 2088 - RNA, 19 nt, Artificial Sequence
  Description of Artificial Sequence: Synthetic oligonucleotide
acugggggcuaugggcugg

SEQ ID NO: 2089 - RNA, 19 nt, Artificial Sequence
  Description of Artificial Sequence: Synthetic oligonucleotide
ggcucacccucuccucugc

SEQ ID NO: 2090 - RNA, 19 nt, Artificial Sequence
  Description of Artificial Sequence: Synthetic oligonucleotide
cggggguggagggccacca

SEQ ID NO: 2091 - RNA, 19 nt, Artificial Sequence
  Description of Artificial Sequence: Synthetic oligonucleotide
agccuuggcuguuacaauc

SEQ ID NO: 2092 - RNA, 19 nt, Artificial Sequence
  Description of Artificial Sequence: Synthetic oligonucleotide
cuuacaccggacaguauug

SEQ ID NO: 2093 - RNA, 19 nt, Artificial Sequence
  Description of Artificial Sequence: Synthetic oligonucleotide
gggccccauggacuugguc

SEQ ID NO: 2094 - RNA, 19 nt, Artificial Sequence
  Description of Artificial Sequence: Synthetic oligonucleotide
cagggaggggugggggugg

SEQ ID NO: 2095 - RNA, 19 nt, Artificial Sequence
  Description of Artificial Sequence: Synthetic oligonucleotide
ggcaucucugguaccuauu

SEQ ID NO: 2096 - RNA, 19 nt, Artificial Sequence
  Description of Artificial Sequence: Synthetic oligonucleotide
ugggguggggggccucuga

SEQ ID NO: 2097 - RNA, 19 nt, Artificial Sequence
  Description of Artificial Sequence: Synthetic oligonucleotide
aaaagggaggcuccuaggc

SEQ ID NO: 2098 - RNA, 19 nt, Artificial Sequence
  Description of Artificial Sequence: Synthetic oligonucleotide
ccccccucaccccucccuc

SEQ ID NO: 2099 - RNA, 19 nt, Artificial Sequence
  Description of Artificial Sequence: Synthetic oligonucleotide
cuccccagggccccacguu

SEQ ID NO: 2100 - RNA, 19 nt, Artificial Sequence
  Description of Artificial Sequence: Synthetic oligonucleotide
ucugcagccuuaagguuga

SEQ ID NO: 2101 - RNA, 19 nt, Artificial Sequence
  Description of Artificial Sequence: Synthetic oligonucleotide
aacaugagugcacguccau

SEQ ID NO: 2102 - RNA, 19 nt, Artificial Sequence
  Description of Artificial Sequence: Synthetic oligonucleotide
ugucagugcugugggacuc

SEQ ID NO: 2103 - RNA, 19 nt, Artificial Sequence
  Description of Artificial Sequence: Synthetic oligonucleotide
ccugugcgugccucggacu

SEQ ID NO: 2104 - RNA, 19 nt, Artificial Sequence
  Description of Artificial Sequence: Synthetic oligonucleotide
ugcgugugucggcgggacg

SEQ ID NO: 2105 - RNA, 19 nt, Artificial Sequence
  Description of Artificial Sequence: Synthetic oligonucleotide
gcaggcacacgugggugug

SEQ ID NO: 2106 - RNA, 19 nt, Artificial Sequence
  Description of Artificial Sequence: Synthetic oligonucleotide
gugugcauguguguuugug

SEQ ID NO: 2107 - RNA, 19 nt, Artificial Sequence
  Description of Artificial Sequence: Synthetic oligonucleotide
gugagggcagcguguccuc

SEQ ID NO: 2108 - RNA, 19 nt, Artificial Sequence
  Description of Artificial Sequence: Synthetic oligonucleotide
ccagugugcauggugugug

SEQ ID NO: 2109 - RNA, 19 nt, Artificial Sequence
  Description of Artificial Sequence: Synthetic oligonucleotide
gggcuugggccccaucccu

SEQ ID NO: 2110 - RNA, 19 nt, Artificial Sequence
  Description of Artificial Sequence: Synthetic oligonucleotide
uggcccgagcauuucaucc

SEQ ID NO: 2111 - RNA, 19 nt, Artificial Sequence
  Description of Artificial Sequence: Synthetic oligonucleotide
cugugggggaggggugcug

SEQ ID NO: 2112 - RNA, 19 nt, Artificial Sequence
  Description of Artificial Sequence: Synthetic oligonucleotide
gaccuagugggaggagccc

SEQ ID NO: 2113 - RNA, 19 nt, Artificial Sequence
  Description of Artificial Sequence: Synthetic oligonucleotide
ccacugugauccaugagcu

SEQ ID NO: 2114 - RNA, 19 nt, Artificial Sequence
  Description of Artificial Sequence: Synthetic oligonucleotide
ugcccugcccacgccuccc

SEQ ID NO: 2115 - RNA, 19 nt, Artificial Sequence
  Description of Artificial Sequence: Synthetic oligonucleotide
ccucccuguagcaacaccu

SEQ ID NO: 2116 - RNA, 19 nt, Artificial Sequence
  Description of Artificial Sequence: Synthetic oligonucleotide
ucuggguguuuggaguuua

SEQ ID NO: 2117 - RNA, 19 nt, Artificial Sequence
  Description of Artificial Sequence: Synthetic oligonucleotide
agcuuuuguggguuugcuc

SEQ ID NO: 2118 - RNA, 19 nt, Artificial Sequence
  Description of Artificial Sequence: Synthetic oligonucleotide
cucccuaucccaucuccug

SEQ ID NO: 2119 - RNA, 19 nt, Artificial Sequence
  Description of Artificial Sequence: Synthetic oligonucleotide
guacuacacaguucauggc

SEQ ID NO: 2120 - RNA, 19 nt, Artificial Sequence
  Description of Artificial Sequence: Synthetic oligonucleotide
caggguggggagggguggg

SEQ ID NO: 2121 - RNA, 19 nt, Artificial Sequence
  Description of Artificial Sequence: Synthetic oligonucleotide
gguugguucggguggguga

SEQ ID NO: 2122 - RNA, 19 nt, Artificial Sequence
  Description of Artificial Sequence: Synthetic oligonucleotide
agggucuuuuuccucugug

SEQ ID NO: 2123 - RNA, 19 nt, Artificial Sequence
  Description of Artificial Sequence: Synthetic oligonucleotide
gugcgauguuguuaucuga

SEQ ID NO: 2124 - RNA, 19 nt, Artificial Sequence
  Description of Artificial Sequence: Synthetic oligonucleotide
acaguucuccgucccuacu

SEQ ID NO: 2125 - RNA, 19 nt, Artificial Sequence
  Description of Artificial Sequence: Synthetic oligonucleotide
uggccuuucuccucgucuu

SEQ ID NO: 2126 - RNA, 19 nt, Artificial Sequence
  Description of Artificial Sequence: Synthetic oligonucleotide
ucauauuuguacgguacaa

SEQ ID NO: 2127 - RNA, 19 nt, Artificial Sequence
  Description of Artificial Sequence: Synthetic oligonucleotide
agcaauaaagacacucauu

SEQ ID NO: 2128 - RNA, 19 nt, Artificial Sequence
  Description of Artificial Sequence: Synthetic oligonucleotide
uucagaccagggcccagcc

SEQ ID NO: 2129 - RNA, 19 nt, Artificial Sequence
  Description of Artificial Sequence: Synthetic oligonucleotide
cugcacucacgccagccca

SEQ ID NO: 2130 - RNA, 19 nt, Artificial Sequence
  Description of Artificial Sequence: Synthetic oligonucleotide
aaccacucugggcuuugcc

SEQ ID NO: 2131 - RNA, 19 nt, Artificial Sequence
  Description of Artificial Sequence: Synthetic oligonucleotide
cuuggugauggagucagac

SEQ ID NO: 2132 - RNA, 19 nt, Artificial Sequence
  Description of Artificial Sequence: Synthetic oligonucleotide
ccccugggccccagcuccu

SEQ ID NO: 2133 - RNA, 19 nt, Artificial Sequence
  Description of Artificial Sequence: Synthetic oligonucleotide
uccuguacuagccguuccc

SEQ ID NO: 2134 - RNA, 19 nt, Artificial Sequence
  Description of Artificial Sequence: Synthetic oligonucleotide
cuucagcaaggagggcacu

SEQ ID NO: 2135 - RNA, 19 nt, Artificial Sequence
  Description of Artificial Sequence: Synthetic oligonucleotide
ugagcucagggugagggca

SEQ ID NO: 2136 - RNA, 19 nt, Artificial Sequence
  Description of Artificial Sequence: Synthetic oligonucleotide
agcuggggugugugcagga

SEQ ID NO: 2137 - RNA, 19 nt, Artificial Sequence
  Description of Artificial Sequence: Synthetic oligonucleotide
agcucaggcuggagagggu

SEQ ID NO: 2138 - RNA, 19 nt, Artificial Sequence
  Description of Artificial Sequence: Synthetic oligonucleotide
uggguggagcuggugcugu

SEQ ID NO: 2139 - RNA, 19 nt, Artificial Sequence
  Description of Artificial Sequence: Synthetic oligonucleotide
uggggcugagggguauggg

SEQ ID NO: 2140 - RNA, 19 nt, Artificial Sequence
  Description of Artificial Sequence: Synthetic oligonucleotide
gaaggcuccccgcaugugg

SEQ ID NO: 2141 - RNA, 19 nt, Artificial Sequence
  Description of Artificial Sequence: Synthetic oligonucleotide
ggggugggguggacagaga

SEQ ID NO: 2142 - RNA, 19 nt, Artificial Sequence
  Description of Artificial Sequence: Synthetic oligonucleotide
accacuccaggcccucagu

SEQ ID NO: 2143 - RNA, 19 nt, Artificial Sequence
  Description of Artificial Sequence: Synthetic oligonucleotide
ugcugcuuaggcuaagaga

SEQ ID NO: 2144 - RNA, 19 nt, Artificial Sequence
  Description of Artificial Sequence: Synthetic oligonucleotide
aggugggguggagggacag

SEQ ID NO: 2145 - RNA, 19 nt, Artificial Sequence
  Description of Artificial Sequence: Synthetic oligonucleotide
gggcuggaagaucugggua

SEQ ID NO: 2146 - RNA, 19 nt, Artificial Sequence
  Description of Artificial Sequence: Synthetic oligonucleotide
agcccagaaugaggagggu

SEQ ID NO: 2147 - RNA, 19 nt, Artificial Sequence
  Description of Artificial Sequence: Synthetic oligonucleotide
ugccugugcugucacugaa

SEQ ID NO: 2148 - RNA, 19 nt, Artificial Sequence
  Description of Artificial Sequence: Synthetic oligonucleotide
augagagggagugguucau

SEQ ID NO: 2149 - RNA, 19 nt, Artificial Sequence
  Description of Artificial Sequence: Synthetic oligonucleotide
uuccacccggcugccgagc

SEQ ID NO: 2150 - RNA, 19 nt, Artificial Sequence
  Description of Artificial Sequence: Synthetic oligonucleotide
ccucagaggggggcauucc

SEQ ID NO: 2151 - RNA, 19 nt, Artificial Sequence
  Description of Artificial Sequence: Synthetic oligonucleotide
cuauccugccccaccuccc

SEQ ID NO: 2152 - RNA, 19 nt, Artificial Sequence
  Description of Artificial Sequence: Synthetic oligonucleotide
cuguuuaugcugccaccug

SEQ ID NO: 2153 - RNA, 19 nt, Artificial Sequence
  Description of Artificial Sequence: Synthetic oligonucleotide
ggaagccuugaggccccca

SEQ ID NO: 2154 - RNA, 19 nt, Artificial Sequence
  Description of Artificial Sequence: Synthetic oligonucleotide
aaauuccaguacagaccca

SEQ ID NO: 2155 - RNA, 19 nt, Artificial Sequence
  Description of Artificial Sequence: Synthetic oligonucleotide
agugguguguucauggugg

SEQ ID NO: 2156 - RNA, 19 nt, Artificial Sequence
  Description of Artificial Sequence: Synthetic oligonucleotide
gcgugguugcugucaccug

SEQ ID NO: 2157 - RNA, 19 nt, Artificial Sequence
  Description of Artificial Sequence: Synthetic oligonucleotide
gggagcuccugagcguuug

SEQ ID NO: 2158 - RNA, 19 nt, Artificial Sequence
  Description of Artificial Sequence: Synthetic oligonucleotide
gguuagaacccuguucagc

SEQ ID NO: 2159 - RNA, 19 nt, Artificial Sequence
  Description of Artificial Sequence: Synthetic oligonucleotide
cuuggggucagcccucccc

SEQ ID NO: 2160 - RNA, 19 nt, Artificial Sequence
  Description of Artificial Sequence: Synthetic oligonucleotide
cuagucacugcccuuuagc

SEQ ID NO: 2161 - RNA, 19 nt, Artificial Sequence
  Description of Artificial Sequence: Synthetic oligonucleotide
ccuggaugugucugggccc

SEQ ID NO: 2162 - RNA, 19 nt, Artificial Sequence
  Description of Artificial Sequence: Synthetic oligonucleotide
ccugcacuucccgugcuug

SEQ ID NO: 2163 - RNA, 19 nt, Artificial Sequence
  Description of Artificial Sequence: Synthetic oligonucleotide
gagucacguggcugcaugg

SEQ ID NO: 2164 - RNA, 19 nt, Artificial Sequence
  Description of Artificial Sequence: Synthetic oligonucleotide
gccgggcgcuggccggaug

SEQ ID NO: 2165 - RNA, 19 nt, Artificial Sequence
  Description of Artificial Sequence: Synthetic oligonucleotide
ggaacaccucccccagcaa

SEQ ID NO: 2166 - RNA, 19 nt, Artificial Sequence
  Description of Artificial Sequence: Synthetic oligonucleotide
agggaccagggaccagagc

SEQ ID NO: 2167 - RNA, 19 nt, Artificial Sequence
  Description of Artificial Sequence: Synthetic oligonucleotide
cccuggccugcccugcuga

SEQ ID NO: 2168 - RNA, 19 nt, Artificial Sequence
  Description of Artificial Sequence: Synthetic oligonucleotide
agcccugcugugcagaggg

SEQ ID NO: 2169 - RNA, 19 nt, Artificial Sequence
  Description of Artificial Sequence: Synthetic oligonucleotide
gccuggcacagaugaauuu

SEQ ID NO: 2170 - RNA, 19 nt, Artificial Sequence
  Description of Artificial Sequence: Synthetic oligonucleotide
ugagauuuugccgcaaggu

SEQ ID NO: 2171 - RNA, 19 nt, Artificial Sequence
  Description of Artificial Sequence: Synthetic oligonucleotide
uguuagcacuucacaccca

SEQ ID NO: 2172 - RNA, 19 nt, Artificial Sequence
  Description of Artificial Sequence: Synthetic oligonucleotide
auugagucuuugagauuuu

SEQ ID NO: 2173 - RNA, 19 nt, Artificial Sequence
  Description of Artificial Sequence: Synthetic oligonucleotide
uaagugaauguaagcagaa

SEQ ID NO: 2174 - RNA, 19 nt, Artificial Sequence
  Description of Artificial Sequence: Synthetic oligonucleotide
aaaagucagauccaauuua

SEQ ID NO: 2175 - RNA, 19 nt, Artificial Sequence
  Description of Artificial Sequence: Synthetic oligonucleotide
acagaaaucagaguuagcu

SEQ ID NO: 2176 - RNA, 19 nt, Artificial Sequence
  Description of Artificial Sequence: Synthetic oligonucleotide
uacagcuaggacucguuug

SEQ ID NO: 2177 - RNA, 19 nt, Artificial Sequence
  Description of Artificial Sequence: Synthetic oligonucleotide
gguugggguuuuuuaguuu

SEQ ID NO: 2178 - RNA, 19 nt, Artificial Sequence
  Description of Artificial Sequence: Synthetic oligonucleotide
ugucuuucuaaagucaugu

SEQ ID NO: 2179 - RNA, 19 nt, Artificial Sequence
  Description of Artificial Sequence: Synthetic oligonucleotide
uggaccuuaauuuaauuac

SEQ ID NO: 2180 - RNA, 19 nt, Artificial Sequence
  Description of Artificial Sequence: Synthetic oligonucleotide
caaaagucuacccuggugg

SEQ ID NO: 2181 - RNA, 19 nt, Artificial Sequence
  Description of Artificial Sequence: Synthetic oligonucleotide
gucauaaaauaggcaggcc

SEQ ID NO: 2182 - RNA, 19 nt, Artificial Sequence
  Description of Artificial Sequence: Synthetic oligonucleotide
cuaugaagaaaggccuuuu

SEQ ID NO: 2183 - RNA, 19 nt, Artificial Sequence
  Description of Artificial Sequence: Synthetic oligonucleotide
uacucuuccaucucauccc

SEQ ID NO: 2184 - RNA, 19 nt, Artificial Sequence
  Description of Artificial Sequence: Synthetic oligonucleotide
cagccccgaguugacccac

SEQ ID NO: 2185 - RNA, 19 nt, Artificial Sequence
  Description of Artificial Sequence: Synthetic oligonucleotide
cguugcugcuccucacacc

SEQ ID NO: 2186 - RNA, 19 nt, Artificial Sequence
  Description of Artificial Sequence: Synthetic oligonucleotide
cauggugaugcaggucucg

SEQ ID NO: 2187 - RNA, 19 nt, Artificial Sequence
  Description of Artificial Sequence: Synthetic oligonucleotide
guagugugggcacaggccu

SEQ ID NO: 2188 - RNA, 19 nt, Artificial Sequence
  Description of Artificial Sequence: Synthetic oligonucleotide
uggcuaccucaucuuuuua

SEQ ID NO: 2189 - RNA, 19 nt, Artificial Sequence
  Description of Artificial Sequence: Synthetic oligonucleotide
agugccucucuccucuucc

SEQ ID NO: 2190 - RNA, 19 nt, Artificial Sequence
  Description of Artificial Sequence: Synthetic oligonucleotide
cacaggauggggucccaca

SEQ ID NO: 2191 - RNA, 19 nt, Artificial Sequence
  Description of Artificial Sequence: Synthetic oligonucleotide
agcugcagcagcuggcccc

SEQ ID NO: 2192 - RNA, 19 nt, Artificial Sequence
  Description of Artificial Sequence: Synthetic oligonucleotide
cguaguugagcaugugugg

SEQ ID NO: 2193 - RNA, 19 nt, Artificial Sequence
  Description of Artificial Sequence: Synthetic oligonucleotide
guuauccuguagagcuuuu

SEQ ID NO: 2194 - RNA, 19 nt, Artificial Sequence
  Description of Artificial Sequence: Synthetic oligonucleotide
ucccaagaaggguguuuga

SEQ ID NO: 2195 - RNA, 19 nt, Artificial Sequence
  Description of Artificial Sequence: Synthetic oligonucleotide
aacuuagagucuuaauaaa

SEQ ID NO: 2196 - RNA, 19 nt, Artificial Sequence
  Description of Artificial Sequence: Synthetic oligonucleotide
aaucuuaccaaauaaauuu

SEQ ID NO: 2197 - RNA, 19 nt, Artificial Sequence
  Description of Artificial Sequence: Synthetic oligonucleotide
uugaguagaauaaucgucu

SEQ ID NO: 2198 - RNA, 19 nt, Artificial Sequence
  Description of Artificial Sequence: Synthetic oligonucleotide
uuuugcaauguacauuuua

SEQ ID NO: 2199 - RNA, 19 nt, Artificial Sequence
  Description of Artificial Sequence: Synthetic oligonucleotide
aaaaauuucacacauucuu

SEQ ID NO: 2200 - RNA, 19 nt, Artificial Sequence
  Description of Artificial Sequence: Synthetic oligonucleotide
uuuuuguauauaaagaaca

SEQ ID NO: 2201 - RNA, 19 nt, Artificial Sequence
  Description of Artificial Sequence: Synthetic oligonucleotide
agugacugggcacaguggc

SEQ ID NO: 2202 - RNA, 19 nt, Artificial Sequence
  Description of Artificial Sequence: Synthetic oligonucleotide
cucaugccuguaaucccag

SEQ ID NO: 2203 - RNA, 19 nt, Artificial Sequence
  Description of Artificial Sequence: Synthetic oligonucleotide
gcaauuugggaggccgagg

SEQ ID NO: 2204 - RNA, 19 nt, Artificial Sequence
  Description of Artificial Sequence: Synthetic oligonucleotide
gcgggcgggucucuugagg

SEQ ID NO: 2205 - RNA, 19 nt, Artificial Sequence
  Description of Artificial Sequence: Synthetic oligonucleotide
gccagggguucgagaccag

SEQ ID NO: 2206 - RNA, 19 nt, Artificial Sequence
  Description of Artificial Sequence: Synthetic oligonucleotide
gccugggcaucauagggag

SEQ ID NO: 2207 - RNA, 19 nt, Artificial Sequence
  Description of Artificial Sequence: Synthetic oligonucleotide
gaccuucaucucuacaaaa

SEQ ID NO: 2208 - RNA, 19 nt, Artificial Sequence
  Description of Artificial Sequence: Synthetic oligonucleotide
aaauacaaaaauuagcugg

SEQ ID NO: 2209 - RNA, 19 nt, Artificial Sequence
  Description of Artificial Sequence: Synthetic oligonucleotide
ggcaugguggugcaugccu

SEQ ID NO: 2210 - RNA, 19 nt, Artificial Sequence
  Description of Artificial Sequence: Synthetic oligonucleotide
ugcaaucccagcuaacuug

SEQ ID NO: 2211 - RNA, 19 nt, Artificial Sequence
  Description of Artificial Sequence: Synthetic oligonucleotide
ggaaggcugaggugaggug

SEQ ID NO: 2212 - RNA, 19 nt, Artificial Sequence
  Description of Artificial Sequence: Synthetic oligonucleotide
gggaagaucacuugagccc

SEQ ID NO: 2213 - RNA, 19 nt, Artificial Sequence
  Description of Artificial Sequence: Synthetic oligonucleotide
caggaguuugaggcugcag

SEQ ID NO: 2214 - RNA, 19 nt, Artificial Sequence
  Description of Artificial Sequence: Synthetic oligonucleotide
gugagcuaugauugcggca

SEQ ID NO: 2215 - RNA, 19 nt, Artificial Sequence
  Description of Artificial Sequence: Synthetic oligonucleotide
acugcacugcagccuggga

SEQ ID NO: 2216 - RNA, 19 nt, Artificial Sequence
  Description of Artificial Sequence: Synthetic oligonucleotide
acaaugagacugugucucu

SEQ ID NO: 2217 - RNA, 19 nt, Artificial Sequence
  Description of Artificial Sequence: Synthetic oligonucleotide
aaacaugauacaugcuauu

SEQ ID NO: 2218 - RNA, 19 nt, Artificial Sequence
  Description of Artificial Sequence: Synthetic oligonucleotide
uaaaaaagacagcaaagca

SEQ ID NO: 2219 - RNA, 19 nt, Artificial Sequence
  Description of Artificial Sequence: Synthetic oligonucleotide
aggaguauaagaaaggaaa

SEQ ID NO: 2220 - RNA, 19 nt, Artificial Sequence
  Description of Artificial Sequence: Synthetic oligonucleotide
auucacccgaggucgcagg

SEQ ID NO: 2221 - RNA, 19 nt, Artificial Sequence
  Description of Artificial Sequence: Synthetic oligonucleotide
ggccuugaguacucauuuu

SEQ ID NO: 2222 - RNA, 19 nt, Artificial Sequence
  Description of Artificial Sequence: Synthetic oligonucleotide
uggugcugauuaccucucu

SEQ ID NO: 2223 - RNA, 19 nt, Artificial Sequence
  Description of Artificial Sequence: Synthetic oligonucleotide
ugcaaauggacacggcauc

SEQ ID NO: 2224 - RNA, 19 nt, Artificial Sequence
  Description of Artificial Sequence: Synthetic oligonucleotide
cauaaauugguaguuuccu

SEQ ID NO: 2225 - RNA, 19 nt, Artificial Sequence
  Description of Artificial Sequence: Synthetic oligonucleotide
ugcucuuuuuguguaaucu

SEQ ID NO: 2226 - RNA, 19 nt, Artificial Sequence
  Description of Artificial Sequence: Synthetic oligonucleotide
uuuuccaguuaaugugaag

SEQ ID NO: 2227 - RNA, 19 nt, Artificial Sequence
  Description of Artificial Sequence: Synthetic oligonucleotide
gccucugggggcugcccuc

SEQ ID NO: 2228 - RNA, 19 nt, Artificial Sequence
  Description of Artificial Sequence: Synthetic oligonucleotide
cgugcacugaugguugugu

SEQ ID NO: 2229 - RNA, 19 nt, Artificial Sequence
  Description of Artificial Sequence: Synthetic oligonucleotide
uggagucgggggcggcagu

SEQ ID NO: 2230 - RNA, 19 nt, Artificial Sequence
  Description of Artificial Sequence: Synthetic oligonucleotide
ugcgauucccuuuuagcug

SEQ ID NO: 2231 - RNA, 19 nt, Artificial Sequence
  Description of Artificial Sequence: Synthetic oligonucleotide
gcugcauggggggaacuca

SEQ ID NO: 2232 - RNA, 19 nt, Artificial Sequence
  Description of Artificial Sequence: Synthetic oligonucleotide
aggcuuuccagcugcuucc

SEQ ID NO: 2233 - RNA, 19 nt, Artificial Sequence
  Description of Artificial Sequence: Synthetic oligonucleotide
cugggguuccaugggguag

SEQ ID NO: 2234 - RNA, 19 nt, Artificial Sequence
  Description of Artificial Sequence: Synthetic oligonucleotide
gaccccucaaccgcuucag

SEQ ID NO: 2235 - RNA, 19 nt, Artificial Sequence
  Description of Artificial Sequence: Synthetic oligonucleotide
gcugccccguuaacaggaa

SEQ ID NO: 2236 - RNA, 19 nt, Artificial Sequence
  Description of Artificial Sequence: Synthetic oligonucleotide
auugacuugguuucguuug

SEQ ID NO: 2237 - RNA, 19 nt, Artificial Sequence
  Description of Artificial Sequence: Synthetic oligonucleotide
ggugcuaccagcaguccug

SEQ ID NO: 2238 - RNA, 19 nt, Artificial Sequence
  Description of Artificial Sequence: Synthetic oligonucleotide
guaauaaacuagcuaucca

SEQ ID NO: 2239 - RNA, 19 nt, Artificial Sequence
  Description of Artificial Sequence: Synthetic oligonucleotide
aacuagcuauccaucugua

SEQ ID NO: 2240 - RNA, 25 nt, Artificial Sequence
  Description of Artificial Sequence: Synthetic oligonucleotide
cggggggggccgcgccgugcuagcc

SEQ ID NO: 2241 - RNA, 25 nt, Artificial Sequence
  Description of Artificial Sequence: Synthetic oligonucleotide
cguugggccugccucggaggaggcg

SEQ ID NO: 2242 - RNA, 25 nt, Artificial Sequence
  Description of Artificial Sequence: Synthetic oligonucleotide
gucgccgccgccgcugccgcugccg

SEQ ID NO: 2243 - RNA, 25 nt, Artificial Sequence
  Description of Artificial Sequence: Synthetic oligonucleotide
ggcgccguugccgcugccgggaaac

SEQ ID NO: 2244 - RNA, 25 nt, Artificial Sequence
  Description of Artificial Sequence: Synthetic oligonucleotide
cacaaggaaagggaaccagcgcagc

SEQ ID NO: 2245 - RNA, 25 nt, Artificial Sequence
  Description of Artificial Sequence: Synthetic oligonucleotide
cguggcgaugggcggggguagagcc

SEQ ID NO: 2246 - RNA, 25 nt, Artificial Sequence
  Description of Artificial Sequence: Synthetic oligonucleotide
cccgccggagaggcugggcggcugc

SEQ ID NO: 2247 - RNA, 25 nt, Artificial Sequence
  Description of Artificial Sequence: Synthetic oligonucleotide
ccggugacagacugugcccugucca

SEQ ID NO: 2248 - RNA, 25 nt, Artificial Sequence
  Description of Artificial Sequence: Synthetic oligonucleotide
acggugccuccugcauguccugcug

SEQ ID NO: 2249 - RNA, 25 nt, Artificial Sequence
  Description of Artificial Sequence: Synthetic oligonucleotide
gcccugagcugucccgagcuaggug

SEQ ID NO: 2250 - RNA, 25 nt, Artificial Sequence
  Description of Artificial Sequence: Synthetic oligonucleotide
gacagcguaccacgcugccaccaug

SEQ ID NO: 2251 - RNA, 25 nt, Artificial Sequence
  Description of Artificial Sequence: Synthetic oligonucleotide
gaaugaggugucugucaucaaagaa

SEQ ID NO: 2252 - RNA, 25 nt, Artificial Sequence
  Description of Artificial Sequence: Synthetic oligonucleotide
aggcuggcuccacaagcguggugaa

SEQ ID NO: 2253 - RNA, 25 nt, Artificial Sequence
  Description of Artificial Sequence: Synthetic oligonucleotide
auacaucaagaccuggaggccacgg

SEQ ID NO: 2254 - RNA, 25 nt, Artificial Sequence
  Description of Artificial Sequence: Synthetic oligonucleotide
guacuuccugcugaagagcgacggc

SEQ ID NO: 2255 - RNA, 25 nt, Artificial Sequence
  Description of Artificial Sequence: Synthetic oligonucleotide
cuccuucauuggguacaaggagagg

SEQ ID NO: 2256 - RNA, 25 nt, Artificial Sequence
  Description of Artificial Sequence: Synthetic oligonucleotide
gcccgaggccccugaucagacucua

SEQ ID NO: 2257 - RNA, 25 nt, Artificial Sequence
  Description of Artificial Sequence: Synthetic oligonucleotide
accccccuuaaacaacuucuccgua

SEQ ID NO: 2258 - RNA, 25 nt, Artificial Sequence
  Description of Artificial Sequence: Synthetic oligonucleotide
agcagaaugccagcugaugaagacc

SEQ ID NO: 2259 - RNA, 25 nt, Artificial Sequence
  Description of Artificial Sequence: Synthetic oligonucleotide
cgagaggccgcgacccaacaccuuu

SEQ ID NO: 2260 - RNA, 25 nt, Artificial Sequence
  Description of Artificial Sequence: Synthetic oligonucleotide
ugucauacgcugccugcaguggacc

SEQ ID NO: 2261 - RNA, 25 nt, Artificial Sequence
  Description of Artificial Sequence: Synthetic oligonucleotide
cacagucaucgagaggaccuuccac

SEQ ID NO: 2262 - RNA, 25 nt, Artificial Sequence
  Description of Artificial Sequence: Synthetic oligonucleotide
cguggauucuccagacgagagggag

SEQ ID NO: 2263 - RNA, 25 nt, Artificial Sequence
  Description of Artificial Sequence: Synthetic oligonucleotide
ggaguggaugcgggccauccagaug

SEQ ID NO: 2264 - RNA, 25 nt, Artificial Sequence
  Description of Artificial Sequence: Synthetic oligonucleotide
ggucgccaacagccucaagcagcgg

SEQ ID NO: 2265 - RNA, 25 nt, Artificial Sequence
  Description of Artificial Sequence: Synthetic oligonucleotide
ggccccaggcgaggaccccauggac

SEQ ID NO: 2266 - RNA, 25 nt, Artificial Sequence
  Description of Artificial Sequence: Synthetic oligonucleotide
cuacaaguguggcucccccagugac

SEQ ID NO: 2267 - RNA, 25 nt, Artificial Sequence
  Description of Artificial Sequence: Synthetic oligonucleotide
cuccuccacgacugaggagauggaa

SEQ ID NO: 2268 - RNA, 25 nt, Artificial Sequence
  Description of Artificial Sequence: Synthetic oligonucleotide
aguggcggucagcaaggcacgggcu

SEQ ID NO: 2269 - RNA, 25 nt, Artificial Sequence
  Description of Artificial Sequence: Synthetic oligonucleotide
uaaagugaccaugaaugacuucgac

SEQ ID NO: 2270 - RNA, 25 nt, Artificial Sequence
  Description of Artificial Sequence: Synthetic oligonucleotide
cuaucucaaacuccuuggcaaggga

SEQ ID NO: 2271 - RNA, 25 nt, Artificial Sequence
  Description of Artificial Sequence: Synthetic oligonucleotide
aaccuuuggcaaagucauccuggug

SEQ ID NO: 2272 - RNA, 25 nt, Artificial Sequence
  Description of Artificial Sequence: Synthetic oligonucleotide
gcgggagaaggccacuggccgcuac

SEQ ID NO: 2273 - RNA, 25 nt, Artificial Sequence
  Description of Artificial Sequence: Synthetic oligonucleotide
cuacgccaugaagauccugcggaag

SEQ ID NO: 2274 - RNA, 25 nt, Artificial Sequence
  Description of Artificial Sequence: Synthetic oligonucleotide
ggaagucaucauugccaaggaugaa

SEQ ID NO: 2275 - RNA, 25 nt, Artificial Sequence
  Description of Artificial Sequence: Synthetic oligonucleotide
agucgcucacacagucaccgagagc

SEQ ID NO: 2276 - RNA, 25 nt, Artificial Sequence
  Description of Artificial Sequence: Synthetic oligonucleotide
ccggguccuccagaacaccaggcac

SEQ ID NO: 2277 - RNA, 25 nt, Artificial Sequence
  Description of Artificial Sequence: Synthetic oligonucleotide
cccguuccucacugcgcugaaguau

SEQ ID NO: 2278 - RNA, 25 nt, Artificial Sequence
  Description of Artificial Sequence: Synthetic oligonucleotide
ugccuuccagacccacgaccgccug

SEQ ID NO: 2279 - RNA, 25 nt, Artificial Sequence
  Description of Artificial Sequence: Synthetic oligonucleotide
gugcuuugugauggaguaugccaac

SEQ ID NO: 2280 - RNA, 25 nt, Artificial Sequence
  Description of Artificial Sequence: Synthetic oligonucleotide
cgggggugagcuguucuuccaccug

SEQ ID NO: 2281 - RNA, 25 nt, Artificial Sequence
  Description of Artificial Sequence: Synthetic oligonucleotide
gucccgggagcgugucuucacagag

SEQ ID NO: 2282 - RNA, 25 nt, Artificial Sequence
  Description of Artificial Sequence: Synthetic oligonucleotide
ggagcgggcccgguuuuauggugca

SEQ ID NO: 2283 - RNA, 25 nt, Artificial Sequence
  Description of Artificial Sequence: Synthetic oligonucleotide
agagauugucucggcucuugaguac

SEQ ID NO: 2284 - RNA, 25 nt, Artificial Sequence
  Description of Artificial Sequence: Synthetic oligonucleotide
cuugcacucgcgggacgugguauac

SEQ ID NO: 2285 - RNA, 25 nt, Artificial Sequence
  Description of Artificial Sequence: Synthetic oligonucleotide
ccgcgacaucaagcuggaaaaccuc

SEQ ID NO: 2286 - RNA, 25 nt, Artificial Sequence
  Description of Artificial Sequence: Synthetic oligonucleotide
caugcuggacaaagauggccacauc

SEQ ID NO: 2287 - RNA, 25 nt, Artificial Sequence
  Description of Artificial Sequence: Synthetic oligonucleotide
caagaucacugacuuuggccucugc

SEQ ID NO: 2288 - RNA, 25 nt, Artificial Sequence
  Description of Artificial Sequence: Synthetic oligonucleotide
caaagagggcaucagugacggggcc

SEQ ID NO: 2289 - RNA, 25 nt, Artificial Sequence
  Description of Artificial Sequence: Synthetic oligonucleotide
caccaugaaaaccuucugugggacc

SEQ ID NO: 2290 - RNA, 25 nt, Artificial Sequence
  Description of Artificial Sequence: Synthetic oligonucleotide
cccggaguaccuggcgccugaggug

SEQ ID NO: 2291 - RNA, 25 nt, Artificial Sequence
  Description of Artificial Sequence: Synthetic oligonucleotide
gcuggaggacaaugacuauggccgg

SEQ ID NO: 2292 - RNA, 25 nt, Artificial Sequence
  Description of Artificial Sequence: Synthetic oligonucleotide
ggccguggacuggugggggcugggu

SEQ ID NO: 2293 - RNA, 25 nt, Artificial Sequence
  Description of Artificial Sequence: Synthetic oligonucleotide
uguggucauguacgagaugaugugc

SEQ ID NO: 2294 - RNA, 25 nt, Artificial Sequence
  Description of Artificial Sequence: Synthetic oligonucleotide
cggccgccugcccuucuacaaccag

SEQ ID NO: 2295 - RNA, 25 nt, Artificial Sequence
  Description of Artificial Sequence: Synthetic oligonucleotide
ggaccacgagcgccucuucgagcuc

SEQ ID NO: 2296 - RNA, 25 nt, Artificial Sequence
  Description of Artificial Sequence: Synthetic oligonucleotide
cauccucauggaagagauccgcuuc

SEQ ID NO: 2297 - RNA, 25 nt, Artificial Sequence
  Description of Artificial Sequence: Synthetic oligonucleotide
cccgcgcacgcucagccccgaggcc

SEQ ID NO: 2298 - RNA, 25 nt, Artificial Sequence
  Description of Artificial Sequence: Synthetic oligonucleotide
caagucccugcuugcugggcugcuu

SEQ ID NO: 2299 - RNA, 25 nt, Artificial Sequence
  Description of Artificial Sequence: Synthetic oligonucleotide
uaagaaggaccccaagcagaggcuu

SEQ ID NO: 2300 - RNA, 25 nt, Artificial Sequence
  Description of Artificial Sequence: Synthetic oligonucleotide
ugguggggggcccagcgaugccaag

SEQ ID NO: 2301 - RNA, 25 nt, Artificial Sequence
  Description of Artificial Sequence: Synthetic oligonucleotide
ggaggucauggagcacagguucuuc

SEQ ID NO: 2302 - RNA, 25 nt, Artificial Sequence
  Description of Artificial Sequence: Synthetic oligonucleotide
ccucagcaucaacuggcaggacgug

SEQ ID NO: 2303 - RNA, 25 nt, Artificial Sequence
  Description of Artificial Sequence: Synthetic oligonucleotide
gguccagaagaagcuccugccaccc

SEQ ID NO: 2304 - RNA, 25 nt, Artificial Sequence
  Description of Artificial Sequence: Synthetic oligonucleotide
cuucaaaccucaggucacguccgag

SEQ ID NO: 2305 - RNA, 25 nt, Artificial Sequence
  Description of Artificial Sequence: Synthetic oligonucleotide
ggucgacacaagguacuucgaugau

SEQ ID NO: 2306 - RNA, 25 nt, Artificial Sequence
  Description of Artificial Sequence: Synthetic oligonucleotide
ugaauuuaccgcccaguccaucaca

SEQ ID NO: 2307 - RNA, 25 nt, Artificial Sequence
  Description of Artificial Sequence: Synthetic oligonucleotide
aaucacacccccugaccgcuaugac

SEQ ID NO: 2308 - RNA, 25 nt, Artificial Sequence
  Description of Artificial Sequence: Synthetic oligonucleotide
cagccugggcuuacuggagcuggac

SEQ ID NO: 2309 - RNA, 25 nt, Artificial Sequence
  Description of Artificial Sequence: Synthetic oligonucleotide
ccagcggacccacuucccccaguuc

SEQ ID NO: 2310 - RNA, 25 nt, Artificial Sequence
  Description of Artificial Sequence: Synthetic oligonucleotide
cuccuacucggccagcauccgcgag

SEQ ID NO: 2311 - RNA, 25 nt, Artificial Sequence
  Description of Artificial Sequence: Synthetic oligonucleotide
gugagcagucugcccacgcagagga

SEQ ID NO: 2312 - RNA, 25 nt, Artificial Sequence
  Description of Artificial Sequence: Synthetic oligonucleotide
acgcacgcucgcugccaucaccgcu

SEQ ID NO: 2313 - RNA, 25 nt, Artificial Sequence
  Description of Artificial Sequence: Synthetic oligonucleotide
ugggugguuuuuucccccuaacuuu

SEQ ID NO: 2314 - RNA, 25 nt, Artificial Sequence
  Description of Artificial Sequence: Synthetic oligonucleotide
uuuacuuagccuuuuugguuugugu

SEQ ID NO: 2315 - RNA, 25 nt, Artificial Sequence
  Description of Artificial Sequence: Synthetic oligonucleotide
uccccacccccaccuccucaccccc

SEQ ID NO: 2316 - RNA, 25 nt, Artificial Sequence
  Description of Artificial Sequence: Synthetic oligonucleotide
cuuuccaguucuucuucaggccccu

SEQ ID NO: 2317 - RNA, 25 nt, Artificial Sequence
  Description of Artificial Sequence: Synthetic oligonucleotide
ucccagacgcaccccagcggccccu

SEQ ID NO: 2318 - RNA, 25 nt, Artificial Sequence
  Description of Artificial Sequence: Synthetic oligonucleotide
ugcagccccugccuccagccuccag

SEQ ID NO: 2319 - RNA, 25 nt, Artificial Sequence
  Description of Artificial Sequence: Synthetic oligonucleotide
gccucaccuuugugcccagacucgc

SEQ ID NO: 2320 - RNA, 25 nt, Artificial Sequence
  Description of Artificial Sequence: Synthetic oligonucleotide
cauuuggaagacuccaccucccgcc

SEQ ID NO: 2321 - RNA, 25 nt, Artificial Sequence
  Description of Artificial Sequence: Synthetic oligonucleotide
ccaggccugggcuguugggcgguug

SEQ ID NO: 2322 - RNA, 25 nt, Artificial Sequence
  Description of Artificial Sequence: Synthetic oligonucleotide
ggagauucagguuuuaauccacaca

SEQ ID NO: 2323 - RNA, 25 nt, Artificial Sequence
  Description of Artificial Sequence: Synthetic oligonucleotide
aagccccagugaggggugaagcaug

SEQ ID NO: 2324 - RNA, 25 nt, Artificial Sequence
  Description of Artificial Sequence: Synthetic oligonucleotide
ggcgccuggggccugccugaguuuc

SEQ ID NO: 2325 - RNA, 25 nt, Artificial Sequence
  Description of Artificial Sequence: Synthetic oligonucleotide
cuggccugggugucgugcugguguc

SEQ ID NO: 2326 - RNA, 25 nt, Artificial Sequence
  Description of Artificial Sequence: Synthetic oligonucleotide
cugccuccgcgcugcugcaucugga

SEQ ID NO: 2327 - RNA, 25 nt, Artificial Sequence
  Description of Artificial Sequence: Synthetic oligonucleotide
acgaaggcugccuucuggugggacg

SEQ ID NO: 2328 - RNA, 25 nt, Artificial Sequence
  Description of Artificial Sequence: Synthetic oligonucleotide
gcgacacccggcagacaguggugcu

SEQ ID NO: 2329 - RNA, 25 nt, Artificial Sequence
  Description of Artificial Sequence: Synthetic oligonucleotide
ugccuuccaggccccguggccuagg

SEQ ID NO: 2330 - RNA, 25 nt, Artificial Sequence
  Description of Artificial Sequence: Synthetic oligonucleotide
gcucggaguggccaggcacggggcg

SEQ ID NO: 2331 - RNA, 25 nt, Artificial Sequence
  Description of Artificial Sequence: Synthetic oligonucleotide
gguccaaucccccacccgcuguccc

SEQ ID NO: 2332 - RNA, 25 nt, Artificial Sequence
  Description of Artificial Sequence: Synthetic oligonucleotide
cccuaugggggcagaaaagcaauaa

SEQ ID NO: 2333 - RNA, 25 nt, Artificial Sequence
  Description of Artificial Sequence: Synthetic oligonucleotide
auguccaggggcaggcaggggcccu

SEQ ID NO: 2334 - RNA, 25 nt, Artificial Sequence
  Description of Artificial Sequence: Synthetic oligonucleotide
uugggagcugcagggcuggggguua

SEQ ID NO: 2335 - RNA, 25 nt, Artificial Sequence
  Description of Artificial Sequence: Synthetic oligonucleotide
agggcugcucccuggugaauggagu

SEQ ID NO: 2336 - RNA, 25 nt, Artificial Sequence
  Description of Artificial Sequence: Synthetic oligonucleotide
ucagauccuaggaucuguaccaugg

SEQ ID NO: 2337 - RNA, 25 nt, Artificial Sequence
  Description of Artificial Sequence: Synthetic oligonucleotide
gggaaccaggaguggccgggcuggg

SEQ ID NO: 2338 - RNA, 25 nt, Artificial Sequence
  Description of Artificial Sequence: Synthetic oligonucleotide
gugccgccuccugguccggccuccu

SEQ ID NO: 2339 - RNA, 25 nt, Artificial Sequence
  Description of Artificial Sequence: Synthetic oligonucleotide
uccccaccaaacuguccucacccua

SEQ ID NO: 2340 - RNA, 25 nt, Artificial Sequence
  Description of Artificial Sequence: Synthetic oligonucleotide
auggaugaggcaggaggaacauuug

SEQ ID NO: 2341 - RNA, 25 nt, Artificial Sequence
  Description of Artificial Sequence: Synthetic oligonucleotide
ggggccaaaccugccugccucccag

SEQ ID NO: 2342 - RNA, 25 nt, Artificial Sequence
  Description of Artificial Sequence: Synthetic oligonucleotide
gccccgugccuuacuagggcuuccu

SEQ ID NO: 2343 - RNA, 25 nt, Artificial Sequence
  Description of Artificial Sequence: Synthetic oligonucleotide
uuccagcuggccuuaccucccgcug

SEQ ID NO: 2344 - RNA, 25 nt, Artificial Sequence
  Description of Artificial Sequence: Synthetic oligonucleotide
ggacccugggccuggccuggcccca

SEQ ID NO: 2345 - RNA, 25 nt, Artificial Sequence
  Description of Artificial Sequence: Synthetic oligonucleotide
acugggggcuaugggcugggcucac

SEQ ID NO: 2346 - RNA, 25 nt, Artificial Sequence
  Description of Artificial Sequence: Synthetic oligonucleotide
cccucuccucugcggggguggaggg

SEQ ID NO: 2347 - RNA, 25 nt, Artificial Sequence
  Description of Artificial Sequence: Synthetic oligonucleotide
gccaccagccuuggcuguuacaauc

SEQ ID NO: 2348 - RNA, 25 nt, Artificial Sequence
  Description of Artificial Sequence: Synthetic oligonucleotide
cuuacaccggacaguauugggcccc

SEQ ID NO: 2349 - RNA, 25 nt, Artificial Sequence
  Description of Artificial Sequence: Synthetic oligonucleotide
cauggacuuggucagggaggggugg

SEQ ID NO: 2350 - RNA, 25 nt, Artificial Sequence
  Description of Artificial Sequence: Synthetic oligonucleotide
ggggugggcaucucugguaccuauu

SEQ ID NO: 2351 - RNA, 25 nt, Artificial Sequence
  Description of Artificial Sequence: Synthetic oligonucleotide
ugggguggggggccucugaaaaggg

SEQ ID NO: 2352 - RNA, 25 nt, Artificial Sequence
  Description of Artificial Sequence: Synthetic oligonucleotide
gaggcuccuaggccccccucacccc

SEQ ID NO: 2353 - RNA, 25 nt, Artificial Sequence
  Description of Artificial Sequence: Synthetic oligonucleotide
cucccucuccccagggccccacguu

SEQ ID NO: 2354 - RNA, 25 nt, Artificial Sequence
  Description of Artificial Sequence: Synthetic oligonucleotide
ucugcagccuuaagguugaacauga

SEQ ID NO: 2355 - RNA, 25 nt, Artificial Sequence
  Description of Artificial Sequence: Synthetic oligonucleotide
agugcacguccaugucagugcugug

SEQ ID NO: 2356 - RNA, 25 nt, Artificial Sequence
  Description of Artificial Sequence: Synthetic oligonucleotide
gggacuccugugcgugccucggacu

SEQ ID NO: 2357 - RNA, 25 nt, Artificial Sequence
  Description of Artificial Sequence: Synthetic oligonucleotide
ugcgugugucggcgggacgcaggca

SEQ ID NO: 2358 - RNA, 25 nt, Artificial Sequence
  Description of Artificial Sequence: Synthetic oligonucleotide
acacgugggugugugugcaugugug

SEQ ID NO: 2359 - RNA, 25 nt, Artificial Sequence
  Description of Artificial Sequence: Synthetic oligonucleotide
guuugugugagggcagcguguccuc

SEQ ID NO: 2360 - RNA, 25 nt, Artificial Sequence
  Description of Artificial Sequence: Synthetic oligonucleotide
ccagugugcauggugugugggcuug

SEQ ID NO: 2361 - RNA, 25 nt, Artificial Sequence
  Description of Artificial Sequence: Synthetic oligonucleotide
gggccccaucccuggcccgagcauu

SEQ ID NO: 2362 - RNA, 25 nt, Artificial Sequence
  Description of Artificial Sequence: Synthetic oligonucleotide
uucauccugugggggaggggugcug

SEQ ID NO: 2363 - RNA, 25 nt, Artificial Sequence
  Description of Artificial Sequence: Synthetic oligonucleotide
gaccuagugggaggagccccacugu

SEQ ID NO: 2364 - RNA, 25 nt, Artificial Sequence
  Description of Artificial Sequence: Synthetic oligonucleotide
ugauccaugagcugcccugcccacg

SEQ ID NO: 2365 - RNA, 25 nt, Artificial Sequence
  Description of Artificial Sequence: Synthetic oligonucleotide
gccuccccucccuguagcaacaccu

SEQ ID NO: 2366 - RNA, 25 nt, Artificial Sequence
  Description of Artificial Sequence: Synthetic oligonucleotide
ucuggguguuuggaguuuagcuuuu

SEQ ID NO: 2367 - RNA, 25 nt, Artificial Sequence
  Description of Artificial Sequence: Synthetic oligonucleotide
uguggguuugcucucccuaucccau

SEQ ID NO: 2368 - RNA, 25 nt, Artificial Sequence
  Description of Artificial Sequence: Synthetic oligonucleotide
ucuccuguacuacacaguucauggc

SEQ ID NO: 2369 - RNA, 25 nt, Artificial Sequence
  Description of Artificial Sequence: Synthetic oligonucleotide
caggguggggaggggugggguuggu

SEQ ID NO: 2370 - RNA, 25 nt, Artificial Sequence
  Description of Artificial Sequence: Synthetic oligonucleotide
uucgggugggugagggucuuuuucc

SEQ ID NO: 2371 - RNA, 25 nt, Artificial Sequence
  Description of Artificial Sequence: Synthetic oligonucleotide
cucugugugcgauguuguuaucuga

SEQ ID NO: 2372 - RNA, 25 nt, Artificial Sequence
  Description of Artificial Sequence: Synthetic oligonucleotide
acaguucuccgucccuacuggccuu

SEQ ID NO: 2373 - RNA, 25 nt, Artificial Sequence
  Description of Artificial Sequence: Synthetic oligonucleotide
uucuccucgucuucauauuuguacg

SEQ ID NO: 2374 - RNA, 25 nt, Artificial Sequence
  Description of Artificial Sequence: Synthetic oligonucleotide
gguacaagcaauaaagacacucauu

SEQ ID NO: 2375 - RNA, 25 nt, Artificial Sequence
  Description of Artificial Sequence: Synthetic oligonucleotide
uucagaccagggcccagccugcacu

SEQ ID NO: 2376 - RNA, 25 nt, Artificial Sequence
  Description of Artificial Sequence: Synthetic oligonucleotide
ucacgccagcccaaccacucugggc

SEQ ID NO: 2377 - RNA, 25 nt, Artificial Sequence
  Description of Artificial Sequence: Synthetic oligonucleotide
cuuugccuuggugauggagucagac

SEQ ID NO: 2378 - RNA, 25 nt, Artificial Sequence
  Description of Artificial Sequence: Synthetic oligonucleotide
ccccugggccccagcuccuccugua

SEQ ID NO: 2379 - RNA, 25 nt, Artificial Sequence
  Description of Artificial Sequence: Synthetic oligonucleotide
acuagccguucccuucagcaaggag

SEQ ID NO: 2380 - RNA, 25 nt, Artificial Sequence
  Description of Artificial Sequence: Synthetic oligonucleotide
gggcacugagcucagggugagggca

SEQ ID NO: 2381 - RNA, 25 nt, Artificial Sequence
  Description of Artificial Sequence: Synthetic oligonucleotide
agcuggggugugugcaggagcucag

SEQ ID NO: 2382 - RNA, 25 nt, Artificial Sequence
  Description of Artificial Sequence: Synthetic oligonucleotide
ggcuggagaggguggguggagcugg

SEQ ID NO: 2383 - RNA, 25 nt, Artificial Sequence
  Description of Artificial Sequence: Synthetic oligonucleotide
gugcuguggggcugagggguauggg

SEQ ID NO: 2384 - RNA, 25 nt, Artificial Sequence
  Description of Artificial Sequence: Synthetic oligonucleotide
gaaggcuccccgcaugugggggugg

SEQ ID NO: 2385 - RNA, 25 nt, Artificial Sequence
  Description of Artificial Sequence: Synthetic oligonucleotide
ggguggacagagaccacuccaggcc

SEQ ID NO: 2386 - RNA, 25 nt, Artificial Sequence
  Description of Artificial Sequence: Synthetic oligonucleotide
ccucagugcugcuuaggcuaagaga

SEQ ID NO: 2387 - RNA, 25 nt, Artificial Sequence
  Description of Artificial Sequence: Synthetic oligonucleotide
aggugggguggagggacagggcugg

SEQ ID NO: 2388 - RNA, 25 nt, Artificial Sequence
  Description of Artificial Sequence: Synthetic oligonucleotide
gaagaucuggguagcccagaaugag

SEQ ID NO: 2389 - RNA, 25 nt, Artificial Sequence
  Description of Artificial Sequence: Synthetic oligonucleotide
ggagggugccugugcugucacugaa

SEQ ID NO: 2390 - RNA, 25 nt, Artificial Sequence
  Description of Artificial Sequence: Synthetic oligonucleotide
augagagggagugguucauuccacc

SEQ ID NO: 2391 - RNA, 25 nt, Artificial Sequence
  Description of Artificial Sequence: Synthetic oligonucleotide
ccggcugccgagccucagagggggg

SEQ ID NO: 2392 - RNA, 25 nt, Artificial Sequence
  Description of Artificial Sequence: Synthetic oligonucleotide
gcauuccuauccugccccaccuccc

SEQ ID NO: 2393 - RNA, 25 nt, Artificial Sequence
  Description of Artificial Sequence: Synthetic oligonucleotide
cuguuuaugcugccaccuggaagcc

SEQ ID NO: 2394 - RNA, 25 nt, Artificial Sequence
  Description of Artificial Sequence: Synthetic oligonucleotide
cuugaggcccccaaauuccaguaca

SEQ ID NO: 2395 - RNA, 25 nt, Artificial Sequence
  Description of Artificial Sequence: Synthetic oligonucleotide
agacccagugguguguucauggugg

SEQ ID NO: 2396 - RNA, 25 nt, Artificial Sequence
  Description of Artificial Sequence: Synthetic oligonucleotide
gcgugguugcugucaccugggagcu

SEQ ID NO: 2397 - RNA, 25 nt, Artificial Sequence
  Description of Artificial Sequence: Synthetic oligonucleotide
uccugagcguuugguuagaacccug

SEQ ID NO: 2398 - RNA, 25 nt, Artificial Sequence
  Description of Artificial Sequence: Synthetic oligonucleotide
guucagcuuggggucagcccucccc

SEQ ID NO: 2399 - RNA, 25 nt, Artificial Sequence
  Description of Artificial Sequence: Synthetic oligonucleotide
cuagucacugcccuuuagccuggau

SEQ ID NO: 2400 - RNA, 25 nt, Artificial Sequence
  Description of Artificial Sequence: Synthetic oligonucleotide
ugugucugggccccugcacuucccg

SEQ ID NO: 2401 - RNA, 25 nt, Artificial Sequence
  Description of Artificial Sequence: Synthetic oligonucleotide
gugcuugagucacguggcugcaugg

SEQ ID NO: 2402 - RNA, 25 nt, Artificial Sequence
  Description of Artificial Sequence: Synthetic oligonucleotide
gccgggcgcuggccggauggaacac

SEQ ID NO: 2403 - RNA, 25 nt, Artificial Sequence
  Description of Artificial Sequence: Synthetic oligonucleotide
ccucccccagcaagggaccagggac

SEQ ID NO: 2404 - RNA, 25 nt, Artificial Sequence
  Description of Artificial Sequence: Synthetic oligonucleotide
ccagagcccuggccugcccugcuga

SEQ ID NO: 2405 - RNA, 25 nt, Artificial Sequence
  Description of Artificial Sequence: Synthetic oligonucleotide
agcccugcugugcagagggccuggc

SEQ ID NO: 2406 - RNA, 25 nt, Artificial Sequence
  Description of Artificial Sequence: Synthetic oligonucleotide
cacagaugaauuugagauuuugccg

SEQ ID NO: 2407 - RNA, 25 nt, Artificial Sequence
  Description of Artificial Sequence: Synthetic oligonucleotide
gcaagguguuagcacuucacaccca

SEQ ID NO: 2408 - RNA, 25 nt, Artificial Sequence
  Description of Artificial Sequence: Synthetic oligonucleotide
auugagucuuugagauuuuaaguga

SEQ ID NO: 2409 - RNA, 25 nt, Artificial Sequence
  Description of Artificial Sequence: Synthetic oligonucleotide
aauguaagcagaaaaagucagaucc

SEQ ID NO: 2410 - RNA, 25 nt, Artificial Sequence
  Description of Artificial Sequence: Synthetic oligonucleotide
caauuuacagaaaucagaguuagcu

SEQ ID NO: 2411 - RNA, 25 nt, Artificial Sequence
  Description of Artificial Sequence: Synthetic oligonucleotide
uacagcuaggacucguuugguuggg

SEQ ID NO: 2412 - RNA, 25 nt, Artificial Sequence
  Description of Artificial Sequence: Synthetic oligonucleotide
gguuuuuuaguuugucuuucuaaag

SEQ ID NO: 2413 - RNA, 25 nt, Artificial Sequence
  Description of Artificial Sequence: Synthetic oligonucleotide
gucauguggaccuuaauuuaauuac

SEQ ID NO: 2414 - RNA, 25 nt, Artificial Sequence
  Description of Artificial Sequence: Synthetic oligonucleotide
caaaagucuacccugguggucauaa

SEQ ID NO: 2415 - RNA, 25 nt, Artificial Sequence
  Description of Artificial Sequence: Synthetic oligonucleotide
aaauaggcaggccuaugaagaaagg

SEQ ID NO: 2416 - RNA, 25 nt, Artificial Sequence
  Description of Artificial Sequence: Synthetic oligonucleotide
gccuuuuacucuuccaucucauccc

SEQ ID NO: 2417 - RNA, 25 nt, Artificial Sequence
  Description of Artificial Sequence: Synthetic oligonucleotide
cagccccgaguugacccacguugcu

SEQ ID NO: 2418 - RNA, 25 nt, Artificial Sequence
  Description of Artificial Sequence: Synthetic oligonucleotide
ugcuccucacaccauggugaugcag

SEQ ID NO: 2419 - RNA, 25 nt, Artificial Sequence
  Description of Artificial Sequence: Synthetic oligonucleotide
ggucucguagugugggcacaggccu

SEQ ID NO: 2420 - RNA, 25 nt, Artificial Sequence
  Description of Artificial Sequence: Synthetic oligonucleotide
uggcuaccucaucuuuuuagugccu

SEQ ID NO: 2421 - RNA, 25 nt, Artificial Sequence
  Description of Artificial Sequence: Synthetic oligonucleotide
ucucuccucuuccacaggauggggu

SEQ ID NO: 2422 - RNA, 25 nt, Artificial Sequence
  Description of Artificial Sequence: Synthetic oligonucleotide
ucccacagcugcagcagcuggcccc

SEQ ID NO: 2423 - RNA, 25 nt, Artificial Sequence
  Description of Artificial Sequence: Synthetic oligonucleotide
cguaguugagcaugugugguuaucc

SEQ ID NO: 2424 - RNA, 25 nt, Artificial Sequence
  Description of Artificial Sequence: Synthetic oligonucleotide
cuguagagcuuuucccaagaagggu

SEQ ID NO: 2425 - RNA, 25 nt, Artificial Sequence
  Description of Artificial Sequence: Synthetic oligonucleotide
uguuugaacuuagagucuuaauaaa

SEQ ID NO: 2426 - RNA, 25 nt, Artificial Sequence
  Description of Artificial Sequence: Synthetic oligonucleotide
aaucuuaccaaauaaauuuugagua

SEQ ID NO: 2427 - RNA, 25 nt, Artificial Sequence
  Description of Artificial Sequence: Synthetic oligonucleotide
agaauaaucgucuuuugcaauguac

SEQ ID NO: 2428 - RNA, 25 nt, Artificial Sequence
  Description of Artificial Sequence: Synthetic oligonucleotide
cauuuuaaaaauuucacacauucuu

SEQ ID NO: 2429 - RNA, 25 nt, Artificial Sequence
  Description of Artificial Sequence: Synthetic oligonucleotide
uuuuuguauauaaagaacagugacu

SEQ ID NO: 2430 - RNA, 25 nt, Artificial Sequence
  Description of Artificial Sequence: Synthetic oligonucleotide
ugggcacaguggcucaugccuguaa

SEQ ID NO: 2431 - RNA, 25 nt, Artificial Sequence
  Description of Artificial Sequence: Synthetic oligonucleotide
aucccagcaauuugggaggccgagg

SEQ ID NO: 2432 - RNA, 25 nt, Artificial Sequence
  Description of Artificial Sequence: Synthetic oligonucleotide
gcgggcgggucucuugaggccaggg

SEQ ID NO: 2433 - RNA, 25 nt, Artificial Sequence
  Description of Artificial Sequence: Synthetic oligonucleotide
gguucgagaccagccugggcaucau

SEQ ID NO: 2434 - RNA, 25 nt, Artificial Sequence
  Description of Artificial Sequence: Synthetic oligonucleotide
uagggagaccuucaucucuacaaaa

SEQ ID NO: 2435 - RNA, 25 nt, Artificial Sequence
  Description of Artificial Sequence: Synthetic oligonucleotide
aaauacaaaaauuagcugggcaugg

SEQ ID NO: 2436 - RNA, 25 nt, Artificial Sequence
  Description of Artificial Sequence: Synthetic oligonucleotide
guggugcaugccugcaaucccagcu

SEQ ID NO: 2437 - RNA, 25 nt, Artificial Sequence
  Description of Artificial Sequence: Synthetic oligonucleotide
uaacuuggaaggcugaggugaggug

SEQ ID NO: 2438 - RNA, 25 nt, Artificial Sequence
  Description of Artificial Sequence: Synthetic oligonucleotide
gggaagaucacuugagcccaggagu

SEQ ID NO: 2439 - RNA, 25 nt, Artificial Sequence
  Description of Artificial Sequence: Synthetic oligonucleotide
uuugaggcugcagugagcuaugauu

SEQ ID NO: 2440 - RNA, 25 nt, Artificial Sequence
  Description of Artificial Sequence: Synthetic oligonucleotide
ugcggcacugcacugcagccuggga

SEQ ID NO: 2441 - RNA, 25 nt, Artificial Sequence
  Description of Artificial Sequence: Synthetic oligonucleotide
acaaugagacugugucucuaaaaau

SEQ ID NO: 2442 - RNA, 25 nt, Artificial Sequence
  Description of Artificial Sequence: Synthetic oligonucleotide
ugcuauuaaaaaagacagcaaagca

SEQ ID NO: 2443 - RNA, 25 nt, Artificial Sequence
  Description of Artificial Sequence: Synthetic oligonucleotide
aggaguauaagaaaggaaauucacc

SEQ ID NO: 2444 - RNA, 25 nt, Artificial Sequence
  Description of Artificial Sequence: Synthetic oligonucleotide
ccgaggucgcagggccuugaguacu

SEQ ID NO: 2445 - RNA, 25 nt, Artificial Sequence
  Description of Artificial Sequence: Synthetic oligonucleotide
ucauuuuggugcugauuaccucucu

SEQ ID NO: 2446 - RNA, 25 nt, Artificial Sequence
  Description of Artificial Sequence: Synthetic oligonucleotide
ugcaaauggacacggcaucauaaau

SEQ ID NO: 2447 - RNA, 25 nt, Artificial Sequence
  Description of Artificial Sequence: Synthetic oligonucleotide
uugguaguuuccugcucuuuuugug

SEQ ID NO: 2448 - RNA, 25 nt, Artificial Sequence
  Description of Artificial Sequence: Synthetic oligonucleotide
guaaucuuuuccaguuaaugugaag

SEQ ID NO: 2449 - RNA, 25 nt, Artificial Sequence
  Description of Artificial Sequence: Synthetic oligonucleotide
gccucugggggcugcccucgugcac

SEQ ID NO: 2450 - RNA, 25 nt, Artificial Sequence
  Description of Artificial Sequence: Synthetic oligonucleotide
cugaugguuguguggagucgggggc

SEQ ID NO: 2451 - RNA, 25 nt, Artificial Sequence
  Description of Artificial Sequence: Synthetic oligonucleotide
cggcagugcgauucccuuuuagcug

SEQ ID NO: 2452 - RNA, 25 nt, Artificial Sequence
  Description of Artificial Sequence: Synthetic oligonucleotide
gcugcauggggggaacucaggcuuu

SEQ ID NO: 2453 - RNA, 25 nt, Artificial Sequence
  Description of Artificial Sequence: Synthetic oligonucleotide
uccagcugcuuccugggguuccaug

SEQ ID NO: 2454 - RNA, 25 nt, Artificial Sequence
  Description of Artificial Sequence: Synthetic oligonucleotide
gggguagaccccucaaccgcuucag

SEQ ID NO: 2455 - RNA, 25 nt, Artificial Sequence
  Description of Artificial Sequence: Synthetic oligonucleotide
gcugccccguuaacaggaauugacu

SEQ ID NO: 2456 - RNA, 25 nt, Artificial Sequence
  Description of Artificial Sequence: Synthetic oligonucleotide
uugguuucguuuggugcuaccagca

SEQ ID NO: 2457 - RNA, 25 nt, Artificial Sequence
  Description of Artificial Sequence: Synthetic oligonucleotide
aguccuguaauaaacuagcuaucca

SEQ ID NO: 2458 - RNA, 25 nt, Artificial Sequence
  Description of Artificial Sequence: Synthetic oligonucleotide
guaauaaacuagcuauccaucugua

SEQ ID NO: 2459 - RNA, 3588 nt, Homo sapiens
gcagcagcagagaauccaaacccuaaagcugauaucacaaaguaccauuucuccaaguugggggcucagaggggagucaucaugagcgauguuaccauugugaaagaagguuggguucagaagaggggagaauauauaaaaaacuggaggccaagauacuuccuuuugaagacagauggcucauucauaggauauaaagagaaaccucaagauguggauuuaccuuauccccucaacaacuuuucaguggcaaaaugccaguuaaugaaaacagaacgaccaaagccaaacacauuuauaaucagaugucuccaguggacuacuguuauagagagaacauuucauguagauacuccagaggaaagggaagaauggacagaagcuauccaggcuguagcagacagacugcagaggcaagaagaggagagaaugaauuguaguccaacuucacaaauugauaauauaggagaggaagagauggaugccucuacaacccaucauaaaagaaagacaaugaaugauuuugacuauuugaaacuacuagguaaaggcacuuuugggaaaguuauuuugguucgagagaaggcaaguggaaaauacuaugcuaugaagauucugaagaaagaagucauuauugcaaaggaugaaguggcacacacucuaacugaaagcagaguauuaaagaacacuagacaucccuuuuuaacauccuugaaauauuccuuccagacaaaagaccguuuguguuuugugauggaauauguuaaugggggcgagcuguuuuuccauuugucgagagagcggguguucucugaggaccgcacacguuucuauggugcagaaauugucucugccuuggacuaucuacauuccggaaagauuguguaccgugaucucaaguuggagaaucuaaugcuggacaaagauggccacauaaaaauuacagauuuuggacuuugcaaagaagggaucacagaugcagccaccaugaagacauucuguggcacuccagaauaucuggcaccagagguguuagaagauaaugacuauggccgagcaguagacugguggggccuagggguugucauguaugaaaugaugugugggagguuaccuuucuacaaccaggaccaugagaaacuuuuugaauuaauauuaauggaagacauuaaauuuccucgaacacucucuucagaugcaaaaucauugcuuucagggcucuugauaaaggauccaaauaaacgccuugguggaggaccagaugaugcaaaagaaauuaugagacacaguuucuucucuggaguaaacuggcaagauguauaugauaaaaagcuuguaccuccuuuuaaaccucaaguaacaucugagacagauacuagauauuuugaugaagaauuuacagcucagacuauuacaauaacaccaccugaaaaauaugaugaggaugguauggacugcauggacaaugagaggcggccgcauuucccucaauuuuccuacucugcaaguggacgagaauaagucucuuucauucugcuacuucacugucaucuucaauuuauuacugaaaaugauuccuggacaucaccaguccuagcucuuacacauagcaggggcaccuuccgacaucccagaccagccaaggguccucaccccucgccaccuuucacccucaugaaaacacacauacacgcaaauacacuccaguuuuuguuuuugcaugaaauuguaucucagucuaaggucucaugcuguugcugcuacugucuuacuauuauagcaacuuuaagaaguaauuuuccaaccuuuggaagucaugagcccaccauuguucauuugugcaccaauuaucaucuuuugaucuuuuaguuuuucccucagugaaggcuaaaugagauacacugauucuagguacauuuuuuaacuuucuagaagagaaaaacuaacuagacuaagaagauuuaguuuauaaauucagaacaagcaauuguggaagggugguggcgugcauauguaaagcacaucagauccgugcgugaaguaggcauauaucacuaagcuguggcuggaauugauuaggaagcauuugguagaaggacugaacaacuguugggauauauauauauauauauaauuuuuuuuuuuuaaauuccugguggauacuguagaagaagcccauaucacauguggaugucgagacuucacgggcaaucaugagcaagugaacacuguucuaccaagaacugaaggcauaugcacagucaaggucacuuaaagggucuuaugaaacaauuugagccagagagcaucuuuccccugugcuuggaaaccuuuuuuccuucuugacauuuaucaccucugauggcugaagaauguagacagguauaaugauacugcuuuucaccaaaauuucuacaccaagguaaacagguguuugccuuauuuaauuuuuuacuuucaguucuacgugaauuagcuuuuucucagauguugaaacuuugaauguccuuuuaugauuuuguuuauauugcaguaguauuuauuuuuuagugaugagaauuguaugucauguuagcaaacgcagcuccaacuuauauaaaauagacuuacugcaguuacuuuugacccaugugcaaggauuguacacgcugaugagaaucaugcacuuuuucuccucuguuaaaaaaaaugauaaggcucugaaauggaauauauugguuagaauuuggcuuugggagaagagaugcugccauuuaaccccuugguacugaaaaugagaaaauccccaacuaugcaugccaagggguuaaugaaacaaauagcuguugacguuugcucauuuaagaauuugaaacguuaugaugaccuggcaacaaaaaguaaugaagaaaauugagaccugagugaagauaagaaaugaucuuuacguggcaaaaugaacacaucuugaguauuuaggaaaugggcagugaaggcuaagaaccugguguguuucuugggaucaugguacauuuaucacugaauuaagccaucagggaaaaaacaacaaaaaaagagaacaccuccagcuuuucuuuuucuguauauacucaugucccccagauuccaacauuucucacugaaagggggcauguaugcaaaccucaucuuucuccuucauuaaugaugaucuucagauuaaacccuuuggugcuaggagcugacaauuuccaaagcagccugugaaguccuaggggcugggggccacucuugcggcaagcagaaggccauccuacuccgcggagugaucauggaaauguauuuuaguuaaacucugacagcucccaaacggaagacuacagcaugacguaguauuaugauugcauuguaugaaagagcaagugacuuucuaaguaggaugaaucauauucauaugcagaugucuuagccucuugacgcuggaaguguggauuuauagcuaugaaaccacugcuggcagugggugggccacugggacugacggggguuaaagggcauuuuacuaaggcagcuaagacauauucagacaucaacguuauccuucuuuuucauauuucuaccugagugaag

SEQ ID NO: 2460 - RNA, 1703 nt, Homo sapiens
gcagcagcagagaauccaaacccuaaagcugauaucacaaaguaccauuucuccaaguugggggcucagaggggagucaucaugagcgauguuaccauugugaaagaagguuggguucagaagaggggagaauauauaaaaaacuggaggccaagauacuuccuuuugaagacagauggcucauucauaggauauaaagagaaaccucaagauguggauuuaccuuauccccucaacaacuuuucaguggcaaaaugccaguuaaugaaaacagaacgaccaaagccaaacacauuuauaaucagaugucuccaguggacuacuguuauagagagaacauuucauguagauacuccagaggaaagggaagaauggacagaagcuauccaggcuguagcagacagacugcagaggcaagaagaggagagaaugaauuguaguccaacuucacaaauugauaauauaggagaggaagagauggaugccucuacaacccaucauaaaagaaagacaaugaaugauuuugacuauuugaaacuacuagguaaaggcacuuuugggaaaguuauuuugguucgagagaaggcaaguggaaaauacuaugcuaugaagauucugaagaaagaagucauuauugcaaaggaugaaguggcacacacucuaacugaaagcagaguauuaaagaacacuagacaucccuuuuuaacauccuugaaauauuccuuccagacaaaagaccguuuguguuuugugauggaauauguuaaugggggcgagcuguuuuuccauuugucgagagagcggguguucucugaggaccgcacacguuucuauggugcagaaauugucucugccuuggacuaucuacauuccggaaagauuguguaccgugaucucaaguuggagaaucuaaugcuggacaaagauggccacauaaaaauuacagauuuuggacuuugcaaagaagggaucacagaugcagccaccaugaagacauucuguggcacuccagaauaucuggcaccagagguguuagaagauaaugacuauggccgagcaguagacugguggggccuagggguugucauguaugaaaugaugugugggagguuaccuuucuacaaccaggaccaugagaaacuuuuugaauuaauauuaauggaagacauuaaauuuccucgaacacucucuucagaugcaaaaucauugcuuucagggcucuugauaaaggauccaaauaaacgccuugguggaggaccagaugaugcaaaagaaauuaugagacacaguuucuucucuggaguaaacuggcaagauguauaugauaaaaagcuuguaccuccuuuuaaaccucaaguaacaucugagacagauacuagauauuuugaugaagaauuuacagcucagacuauuacaauaacaccaccugaaaaaugucagcaaucagauuguggcaugcuggguaacuggaaaaaauaauaaaaaucggcuuccuacagccagcagcacagucacccauggaacuguuggcuuuggauuaaauguggaauugaacgacuacccagaaguguucuggaaagaagcgagauguguggccugccucaccguccucacccaucaaaagcaccagcaggcacguuaacucgaauucucacaaggaaaaggccauuaaagcucaaggugcauuucaaacuccaggcuac

SEQ ID NO: 2461 - RNA, 19 nt, Artificial Sequence
  Description of Artificial Sequence: Synthetic oligonucleotide
gcagcagcagagaauccaa

SEQ ID NO: 2462 - RNA, 19 nt, Artificial Sequence
  Description of Artificial Sequence: Synthetic oligonucleotide
aacccuaaagcugauauca

SEQ ID NO: 2463 - RNA, 19 nt, Artificial Sequence
  Description of Artificial Sequence: Synthetic oligonucleotide
acaaaguaccauuucucca

SEQ ID NO: 2464 - RNA, 19 nt, Artificial Sequence
  Description of Artificial Sequence: Synthetic oligonucleotide
aaguugggggcucagaggg

SEQ ID NO: 2465 - RNA, 19 nt, Artificial Sequence
  Description of Artificial Sequence: Synthetic oligonucleotide
ggagucaucaugagcgaug

SEQ ID NO: 2466 - RNA, 19 nt, Artificial Sequence
  Description of Artificial Sequence: Synthetic oligonucleotide
guuaccauugugaaagaag

SEQ ID NO: 2467 - RNA, 19 nt, Artificial Sequence
  Description of Artificial Sequence: Synthetic oligonucleotide
gguuggguucagaagaggg

SEQ ID NO: 2468 - RNA, 19 nt, Artificial Sequence
  Description of Artificial Sequence: Synthetic oligonucleotide
ggagaauauauaaaaaacu

SEQ ID NO: 2469 - RNA, 19 nt, Artificial Sequence
  Description of Artificial Sequence: Synthetic oligonucleotide
uggaggccaagauacuucc

SEQ ID NO: 2470 - RNA, 19 nt, Artificial Sequence
  Description of Artificial Sequence: Synthetic oligonucleotide
cuuuugaagacagauggcu

SEQ ID NO: 2471 - RNA, 19 nt, Artificial Sequence
  Description of Artificial Sequence: Synthetic oligonucleotide
ucauucauaggauauaaag

SEQ ID NO: 2472 - RNA, 19 nt, Artificial Sequence
  Description of Artificial Sequence: Synthetic oligonucleotide
gagaaaccucaagaugugg

SEQ ID NO: 2473 - RNA, 19 nt, Artificial Sequence
  Description of Artificial Sequence: Synthetic oligonucleotide
gauuuaccuuauccccuca

SEQ ID NO: 2474 - RNA, 19 nt, Artificial Sequence
  Description of Artificial Sequence: Synthetic oligonucleotide
aacaacuuuucaguggcaa

SEQ ID NO: 2475 - RNA, 19 nt, Artificial Sequence
  Description of Artificial Sequence: Synthetic oligonucleotide
aaaugccaguuaaugaaaa

SEQ ID NO: 2476 - RNA, 19 nt, Artificial Sequence
  Description of Artificial Sequence: Synthetic oligonucleotide
acagaacgaccaaagccaa

SEQ ID NO: 2477 - RNA, 19 nt, Artificial Sequence
  Description of Artificial Sequence: Synthetic oligonucleotide
aacacauuuauaaucagau

SEQ ID NO: 2478 - RNA, 19 nt, Artificial Sequence
  Description of Artificial Sequence: Synthetic oligonucleotide
ugucuccaguggacuacug

SEQ ID NO: 2479 - RNA, 19 nt, Artificial Sequence
  Description of Artificial Sequence: Synthetic oligonucleotide
guuauagagagaacauuuc

SEQ ID NO: 2480 - RNA, 19 nt, Artificial Sequence
  Description of Artificial Sequence: Synthetic oligonucleotide
cauguagauacuccagagg

SEQ ID NO: 2481 - RNA, 19 nt, Artificial Sequence
  Description of Artificial Sequence: Synthetic oligonucleotide
gaaagggaagaauggacag

SEQ ID NO: 2482 - RNA, 19 nt, Artificial Sequence
  Description of Artificial Sequence: Synthetic oligonucleotide
gaagcuauccaggcuguag

SEQ ID NO: 2483 - RNA, 19 nt, Artificial Sequence
  Description of Artificial Sequence: Synthetic oligonucleotide
gcagacagacugcagaggc

SEQ ID NO: 2484 - RNA, 19 nt, Artificial Sequence
  Description of Artificial Sequence: Synthetic oligonucleotide
caagaagaggagagaauga

SEQ ID NO: 2485 - RNA, 19 nt, Artificial Sequence
  Description of Artificial Sequence: Synthetic oligonucleotide
aauuguaguccaacuucac

SEQ ID NO: 2486 - RNA, 19 nt, Artificial Sequence
  Description of Artificial Sequence: Synthetic oligonucleotide
caaauugauaauauaggag

SEQ ID NO: 2487 - RNA, 19 nt, Artificial Sequence
  Description of Artificial Sequence: Synthetic oligonucleotide
gaggaagagauggaugccu

SEQ ID NO: 2488 - RNA, 19 nt, Artificial Sequence
  Description of Artificial Sequence: Synthetic oligonucleotide
ucuacaacccaucauaaaa

SEQ ID NO: 2489 - RNA, 19 nt, Artificial Sequence
  Description of Artificial Sequence: Synthetic oligonucleotide
agaaagacaaugaaugauu

SEQ ID NO: 2490 - RNA, 19 nt, Artificial Sequence
  Description of Artificial Sequence: Synthetic oligonucleotide
uuugacuauuugaaacuac

SEQ ID NO: 2491 - RNA, 19 nt, Artificial Sequence
  Description of Artificial Sequence: Synthetic oligonucleotide
cuagguaaaggcacuuuug

SEQ ID NO: 2492 - RNA, 19 nt, Artificial Sequence
  Description of Artificial Sequence: Synthetic oligonucleotide
gggaaaguuauuuugguuc

SEQ ID NO: 2493 - RNA, 19 nt, Artificial Sequence
  Description of Artificial Sequence: Synthetic oligonucleotide
cgagagaaggcaaguggaa

SEQ ID NO: 2494 - RNA, 19 nt, Artificial Sequence
  Description of Artificial Sequence: Synthetic oligonucleotide
aaauacuaugcuaugaaga

SEQ ID NO: 2495 - RNA, 19 nt, Artificial Sequence
  Description of Artificial Sequence: Synthetic oligonucleotide
auucugaagaaagaaguca

SEQ ID NO: 2496 - RNA, 19 nt, Artificial Sequence
  Description of Artificial Sequence: Synthetic oligonucleotide
auuauugcaaaggaugaag

SEQ ID NO: 2497 - RNA, 19 nt, Artificial Sequence
  Description of Artificial Sequence: Synthetic oligonucleotide
guggcacacacucuaacug

SEQ ID NO: 2498 - RNA, 19 nt, Artificial Sequence
  Description of Artificial Sequence: Synthetic oligonucleotide
gaaagcagaguauuaaaga

SEQ ID NO: 2499 - RNA, 19 nt, Artificial Sequence
  Description of Artificial Sequence: Synthetic oligonucleotide
aacacuagacaucccuuuu

SEQ ID NO: 2500 - RNA, 19 nt, Artificial Sequence
  Description of Artificial Sequence: Synthetic oligonucleotide
uuaacauccuugaaauauu

SEQ ID NO: 2501 - RNA, 19 nt, Artificial Sequence
  Description of Artificial Sequence: Synthetic oligonucleotide
uccuuccagacaaaagacc

SEQ ID NO: 2502 - RNA, 19 nt, Artificial Sequence
  Description of Artificial Sequence: Synthetic oligonucleotide
cguuuguguuuugugaugg

SEQ ID NO: 2503 - RNA, 19 nt, Artificial Sequence
  Description of Artificial Sequence: Synthetic oligonucleotide
gaauauguuaaugggggcg

SEQ ID NO: 2504 - RNA, 19 nt, Artificial Sequence
  Description of Artificial Sequence: Synthetic oligonucleotide
gagcuguuuuuccauuugu

SEQ ID NO: 2505 - RNA, 19 nt, Artificial Sequence
  Description of Artificial Sequence: Synthetic oligonucleotide
ucgagagagcggguguucu

SEQ ID NO: 2506 - RNA, 19 nt, Artificial Sequence
  Description of Artificial Sequence: Synthetic oligonucleotide
ucugaggaccgcacacguu

SEQ ID NO: 2507 - RNA, 19 nt, Artificial Sequence
  Description of Artificial Sequence: Synthetic oligonucleotide
uucuauggugcagaaauug

SEQ ID NO: 2508 - RNA, 19 nt, Artificial Sequence
  Description of Artificial Sequence: Synthetic oligonucleotide
gucucugccuuggacuauc

SEQ ID NO: 2509 - RNA, 19 nt, Artificial Sequence
  Description of Artificial Sequence: Synthetic oligonucleotide
cuacauuccggaaagauug

SEQ ID NO: 2510 - RNA, 19 nt, Artificial Sequence
  Description of Artificial Sequence: Synthetic oligonucleotide
guguaccgugaucucaagu

SEQ ID NO: 2511 - RNA, 19 nt, Artificial Sequence
  Description of Artificial Sequence: Synthetic oligonucleotide
uuggagaaucuaaugcugg

SEQ ID NO: 2512 - RNA, 19 nt, Artificial Sequence
  Description of Artificial Sequence: Synthetic oligonucleotide
gacaaagauggccacauaa

SEQ ID NO: 2513 - RNA, 19 nt, Artificial Sequence
  Description of Artificial Sequence: Synthetic oligonucleotide
aaaauuacagauuuuggac

SEQ ID NO: 2514 - RNA, 19 nt, Artificial Sequence
  Description of Artificial Sequence: Synthetic oligonucleotide
cuuugcaaagaagggauca

SEQ ID NO: 2515 - RNA, 19 nt, Artificial Sequence
  Description of Artificial Sequence: Synthetic oligonucleotide
acagaugcagccaccauga

SEQ ID NO: 2516 - RNA, 19 nt, Artificial Sequence
  Description of Artificial Sequence: Synthetic oligonucleotide
aagacauucuguggcacuc

SEQ ID NO: 2517 - RNA, 19 nt, Artificial Sequence
  Description of Artificial Sequence: Synthetic oligonucleotide
ccagaauaucuggcaccag

SEQ ID NO: 2518 - RNA, 19 nt, Artificial Sequence
  Description of Artificial Sequence: Synthetic oligonucleotide
gagguguuagaagauaaug

SEQ ID NO: 2519 - RNA, 19 nt, Artificial Sequence
  Description of Artificial Sequence: Synthetic oligonucleotide
gacuauggccgagcaguag

SEQ ID NO: 2520 - RNA, 19 nt, Artificial Sequence
  Description of Artificial Sequence: Synthetic oligonucleotide
gacugguggggccuagggg

SEQ ID NO: 2521 - RNA, 19 nt, Artificial Sequence
  Description of Artificial Sequence: Synthetic oligonucleotide
guugucauguaugaaauga

SEQ ID NO: 2522 - RNA, 19 nt, Artificial Sequence
  Description of Artificial Sequence: Synthetic oligonucleotide
augugugggagguuaccuu

SEQ ID NO: 2523 - RNA, 19 nt, Artificial Sequence
  Description of Artificial Sequence: Synthetic oligonucleotide
uucuacaaccaggaccaug

SEQ ID NO: 2524 - RNA, 19 nt, Artificial Sequence
  Description of Artificial Sequence: Synthetic oligonucleotide
gagaaacuuuuugaauuaa

SEQ ID NO: 2525 - RNA, 19 nt, Artificial Sequence
  Description of Artificial Sequence: Synthetic oligonucleotide
auauuaauggaagacauua

SEQ ID NO: 2526 - RNA, 19 nt, Artificial Sequence
  Description of Artificial Sequence: Synthetic oligonucleotide
aaauuuccucgaacacucu

SEQ ID NO: 2527 - RNA, 19 nt, Artificial Sequence
  Description of Artificial Sequence: Synthetic oligonucleotide
ucuucagaugcaaaaucau

SEQ ID NO: 2528 - RNA, 19 nt, Artificial Sequence
  Description of Artificial Sequence: Synthetic oligonucleotide
uugcuuucagggcucuuga

SEQ ID NO: 2529 - RNA, 19 nt, Artificial Sequence
  Description of Artificial Sequence: Synthetic oligonucleotide
auaaaggauccaaauaaac

SEQ ID NO: 2530 - RNA, 19 nt, Artificial Sequence
  Description of Artificial Sequence: Synthetic oligonucleotide
cgccuugguggaggaccag

SEQ ID NO: 2531 - RNA, 19 nt, Artificial Sequence
  Description of Artificial Sequence: Synthetic oligonucleotide
gaugaugcaaaagaaauua

SEQ ID NO: 2532 - RNA, 19 nt, Artificial Sequence
  Description of Artificial Sequence: Synthetic oligonucleotide
augagacacaguuucuucu

SEQ ID NO: 2533 - RNA, 19 nt, Artificial Sequence
  Description of Artificial Sequence: Synthetic oligonucleotide
ucuggaguaaacuggcaag

SEQ ID NO: 2534 - RNA, 19 nt, Artificial Sequence
  Description of Artificial Sequence: Synthetic oligonucleotide
gauguauaugauaaaaagc

SEQ ID NO: 2535 - RNA, 19 nt, Artificial Sequence
  Description of Artificial Sequence: Synthetic oligonucleotide
cuuguaccuccuuuuaaac

SEQ ID NO: 2536 - RNA, 19 nt, Artificial Sequence
  Description of Artificial Sequence: Synthetic oligonucleotide
ccucaaguaacaucugaga

SEQ ID NO: 2537 - RNA, 19 nt, Artificial Sequence
  Description of Artificial Sequence: Synthetic oligonucleotide
acagauacuagauauuuug

SEQ ID NO: 2538 - RNA, 19 nt, Artificial Sequence
  Description of Artificial Sequence: Synthetic oligonucleotide
gaugaagaauuuacagcuc

SEQ ID NO: 2539 - RNA, 19 nt, Artificial Sequence
  Description of Artificial Sequence: Synthetic oligonucleotide
cagacuauuacaauaacac

SEQ ID NO: 2540 - RNA, 19 nt, Artificial Sequence
  Description of Artificial Sequence: Synthetic oligonucleotide
ccaccugaaaaauaugaug

SEQ ID NO: 2541 - RNA, 19 nt, Artificial Sequence
  Description of Artificial Sequence: Synthetic oligonucleotide
gaggaugguauggacugca

SEQ ID NO: 2542 - RNA, 19 nt, Artificial Sequence
  Description of Artificial Sequence: Synthetic oligonucleotide
auggacaaugagaggcggc

SEQ ID NO: 2543 - RNA, 19 nt, Artificial Sequence
  Description of Artificial Sequence: Synthetic oligonucleotide
ccgcauuucccucaauuuu

SEQ ID NO: 2544 - RNA, 19 nt, Artificial Sequence
  Description of Artificial Sequence: Synthetic oligonucleotide
uccuacucugcaaguggac

SEQ ID NO: 2545 - RNA, 19 nt, Artificial Sequence
  Description of Artificial Sequence: Synthetic oligonucleotide
cgagaauaagucucuuuca

SEQ ID NO: 2546 - RNA, 19 nt, Artificial Sequence
  Description of Artificial Sequence: Synthetic oligonucleotide
auucugcuacuucacuguc

SEQ ID NO: 2547 - RNA, 19 nt, Artificial Sequence
  Description of Artificial Sequence: Synthetic oligonucleotide
caucuucaauuuauuacug

SEQ ID NO: 2548 - RNA, 19 nt, Artificial Sequence
  Description of Artificial Sequence: Synthetic oligonucleotide
gaaaaugauuccuggacau

SEQ ID NO: 2549 - RNA, 19 nt, Artificial Sequence
  Description of Artificial Sequence: Synthetic oligonucleotide
ucaccaguccuagcucuua

SEQ ID NO: 2550 - RNA, 19 nt, Artificial Sequence
  Description of Artificial Sequence: Synthetic oligonucleotide
acacauagcaggggcaccu

SEQ ID NO: 2551 - RNA, 19 nt, Artificial Sequence
  Description of Artificial Sequence: Synthetic oligonucleotide
uuccgacaucccagaccag

SEQ ID NO: 2552 - RNA, 19 nt, Artificial Sequence
  Description of Artificial Sequence: Synthetic oligonucleotide
gccaaggguccucaccccu

SEQ ID NO: 2553 - RNA, 19 nt, Artificial Sequence
  Description of Artificial Sequence: Synthetic oligonucleotide
ucgccaccuuucacccuca

SEQ ID NO: 2554 - RNA, 19 nt, Artificial Sequence
  Description of Artificial Sequence: Synthetic oligonucleotide
augaaaacacacauacacg

SEQ ID NO: 2555 - RNA, 19 nt, Artificial Sequence
  Description of Artificial Sequence: Synthetic oligonucleotide
gcaaauacacuccaguuuu

SEQ ID NO: 2556 - RNA, 19 nt, Artificial Sequence
  Description of Artificial Sequence: Synthetic oligonucleotide
uuguuuuugcaugaaauug

SEQ ID NO: 2557 - RNA, 19 nt, Artificial Sequence
  Description of Artificial Sequence: Synthetic oligonucleotide
guaucucagucuaaggucu

SEQ ID NO: 2558 - RNA, 19 nt, Artificial Sequence
  Description of Artificial Sequence: Synthetic oligonucleotide
ucaugcuguugcugcuacu

SEQ ID NO: 2559 - RNA, 19 nt, Artificial Sequence
  Description of Artificial Sequence: Synthetic oligonucleotide
ugucuuacuauuauagcaa

SEQ ID NO: 2560 - RNA, 19 nt, Artificial Sequence
  Description of Artificial Sequence: Synthetic oligonucleotide
acuuuaagaaguaauuuuc

SEQ ID NO: 2561 - RNA, 19 nt, Artificial Sequence
  Description of Artificial Sequence: Synthetic oligonucleotide
ccaaccuuuggaagucaug

SEQ ID NO: 2562 - RNA, 19 nt, Artificial Sequence
  Description of Artificial Sequence: Synthetic oligonucleotide
gagcccaccauuguucauu

SEQ ID NO: 2563 - RNA, 19 nt, Artificial Sequence
  Description of Artificial Sequence: Synthetic oligonucleotide
uugugcaccaauuaucauc

SEQ ID NO: 2564 - RNA, 19 nt, Artificial Sequence
  Description of Artificial Sequence: Synthetic oligonucleotide
cuuuugaucuuuuaguuuu

SEQ ID NO: 2565 - RNA, 19 nt, Artificial Sequence
  Description of Artificial Sequence: Synthetic oligonucleotide
uucccucagugaaggcuaa

SEQ ID NO: 2566 - RNA, 19 nt, Artificial Sequence
  Description of Artificial Sequence: Synthetic oligonucleotide
aaugagauacacugauucu

SEQ ID NO: 2567 - RNA, 19 nt, Artificial Sequence
  Description of Artificial Sequence: Synthetic oligonucleotide
uagguacauuuuuuaacuu

SEQ ID NO: 2568 - RNA, 19 nt, Artificial Sequence
  Description of Artificial Sequence: Synthetic oligonucleotide
uucuagaagagaaaaacua

SEQ ID NO: 2569 - RNA, 19 nt, Artificial Sequence
  Description of Artificial Sequence: Synthetic oligonucleotide
aacuagacuaagaagauuu

SEQ ID NO: 2570 - RNA, 19 nt, Artificial Sequence
  Description of Artificial Sequence: Synthetic oligonucleotide
uaguuuauaaauucagaac

SEQ ID NO: 2571 - RNA, 19 nt, Artificial Sequence
  Description of Artificial Sequence: Synthetic oligonucleotide
caagcaauuguggaagggu

SEQ ID NO: 2572 - RNA, 19 nt, Artificial Sequence
  Description of Artificial Sequence: Synthetic oligonucleotide
ugguggcgugcauauguaa

SEQ ID NO: 2573 - RNA, 19 nt, Artificial Sequence
  Description of Artificial Sequence: Synthetic oligonucleotide
aagcacaucagauccgugc

SEQ ID NO: 2574 - RNA, 19 nt, Artificial Sequence
  Description of Artificial Sequence: Synthetic oligonucleotide
cgugaaguaggcauauauc

SEQ ID NO: 2575 - RNA, 19 nt, Artificial Sequence
  Description of Artificial Sequence: Synthetic oligonucleotide
cacuaagcuguggcuggaa

SEQ ID NO: 2576 - RNA, 19 nt, Artificial Sequence
  Description of Artificial Sequence: Synthetic oligonucleotide
auugauuaggaagcauuug

SEQ ID NO: 2577 - RNA, 19 nt, Artificial Sequence
  Description of Artificial Sequence: Synthetic oligonucleotide
gguagaaggacugaacaac

SEQ ID NO: 2578 - RNA, 19 nt, Artificial Sequence
  Description of Artificial Sequence: Synthetic oligonucleotide
cuguugggauauauauaua

SEQ ID NO: 2579 - RNA, 19 nt, Artificial Sequence
  Description of Artificial Sequence: Synthetic oligonucleotide
auauauauaauuuuuuuuu

SEQ ID NO: 2580 - RNA, 19 nt, Artificial Sequence
  Description of Artificial Sequence: Synthetic oligonucleotide
uuuuaaauuccugguggau

SEQ ID NO: 2581 - RNA, 19 nt, Artificial Sequence
  Description of Artificial Sequence: Synthetic oligonucleotide
uacuguagaagaagcccau

SEQ ID NO: 2582 - RNA, 19 nt, Artificial Sequence
  Description of Artificial Sequence: Synthetic oligonucleotide
uaucacauguggaugucga

SEQ ID NO: 2583 - RNA, 19 nt, Artificial Sequence
  Description of Artificial Sequence: Synthetic oligonucleotide
agacuucacgggcaaucau

SEQ ID NO: 2584 - RNA, 19 nt, Artificial Sequence
  Description of Artificial Sequence: Synthetic oligonucleotide
ugagcaagugaacacuguu

SEQ ID NO: 2585 - RNA, 19 nt, Artificial Sequence
  Description of Artificial Sequence: Synthetic oligonucleotide
ucuaccaagaacugaaggc

SEQ ID NO: 2586 - RNA, 19 nt, Artificial Sequence
  Description of Artificial Sequence: Synthetic oligonucleotide
cauaugcacagucaagguc

SEQ ID NO: 2587 - RNA, 19 nt, Artificial Sequence
  Description of Artificial Sequence: Synthetic oligonucleotide
cacuuaaagggucuuauga

SEQ ID NO: 2588 - RNA, 19 nt, Artificial Sequence
  Description of Artificial Sequence: Synthetic oligonucleotide
aaacaauuugagccagaga

SEQ ID NO: 2589 - RNA, 19 nt, Artificial Sequence
  Description of Artificial Sequence: Synthetic oligonucleotide
agcaucuuuccccugugcu

SEQ ID NO: 2590 - RNA, 19 nt, Artificial Sequence
  Description of Artificial Sequence: Synthetic oligonucleotide
uuggaaaccuuuuuuccuu

SEQ ID NO: 2591 - RNA, 19 nt, Artificial Sequence
  Description of Artificial Sequence: Synthetic oligonucleotide
ucuugacauuuaucaccuc

SEQ ID NO: 2592 - RNA, 19 nt, Artificial Sequence
  Description of Artificial Sequence: Synthetic oligonucleotide
cugauggcugaagaaugua

SEQ ID NO: 2593 - RNA, 19 nt, Artificial Sequence
  Description of Artificial Sequence: Synthetic oligonucleotide
agacagguauaaugauacu

SEQ ID NO: 2594 - RNA, 19 nt, Artificial Sequence
  Description of Artificial Sequence: Synthetic oligonucleotide
ugcuuuucaccaaaauuuc

SEQ ID NO: 2595 - RNA, 19 nt, Artificial Sequence
  Description of Artificial Sequence: Synthetic oligonucleotide
cuacaccaagguaaacagg

SEQ ID NO: 2596 - RNA, 19 nt, Artificial Sequence
  Description of Artificial Sequence: Synthetic oligonucleotide
guguuugccuuauuuaauu

SEQ ID NO: 2597 - RNA, 19 nt, Artificial Sequence
  Description of Artificial Sequence: Synthetic oligonucleotide
uuuuuacuuucaguucuac

SEQ ID NO: 2598 - RNA, 19 nt, Artificial Sequence
  Description of Artificial Sequence: Synthetic oligonucleotide
cgugaauuagcuuuuucuc

SEQ ID NO: 2599 - RNA, 19 nt, Artificial Sequence
  Description of Artificial Sequence: Synthetic oligonucleotide
cagauguugaaacuuugaa

SEQ ID NO: 2600 - RNA, 19 nt, Artificial Sequence
  Description of Artificial Sequence: Synthetic oligonucleotide
auguccuuuuaugauuuug

SEQ ID NO: 2601 - RNA, 19 nt, Artificial Sequence
  Description of Artificial Sequence: Synthetic oligonucleotide
guuuauauugcaguaguau

SEQ ID NO: 2602 - RNA, 19 nt, Artificial Sequence
  Description of Artificial Sequence: Synthetic oligonucleotide
uuuauuuuuuagugaugag

SEQ ID NO: 2603 - RNA, 19 nt, Artificial Sequence
  Description of Artificial Sequence: Synthetic oligonucleotide
gaauuguaugucauguuag

SEQ ID NO: 2604 - RNA, 19 nt, Artificial Sequence
  Description of Artificial Sequence: Synthetic oligonucleotide
gcaaacgcagcuccaacuu

SEQ ID NO: 2605 - RNA, 19 nt, Artificial Sequence
  Description of Artificial Sequence: Synthetic oligonucleotide
uauauaaaauagacuuacu

SEQ ID NO: 2606 - RNA, 19 nt, Artificial Sequence
  Description of Artificial Sequence: Synthetic oligonucleotide
ugcaguuacuuuugaccca

SEQ ID NO: 2607 - RNA, 19 nt, Artificial Sequence
  Description of Artificial Sequence: Synthetic oligonucleotide
augugcaaggauuguacac

SEQ ID NO: 2608 - RNA, 19 nt, Artificial Sequence
  Description of Artificial Sequence: Synthetic oligonucleotide
cgcugaugagaaucaugca

SEQ ID NO: 2609 - RNA, 19 nt, Artificial Sequence
  Description of Artificial Sequence: Synthetic oligonucleotide
acuuuuucuccucuguuaa

SEQ ID NO: 2610 - RNA, 19 nt, Artificial Sequence
  Description of Artificial Sequence: Synthetic oligonucleotide
aaaaaaaugauaaggcucu

SEQ ID NO: 2611 - RNA, 19 nt, Artificial Sequence
  Description of Artificial Sequence: Synthetic oligonucleotide
ugaaauggaauauauuggu

SEQ ID NO: 2612 - RNA, 19 nt, Artificial Sequence
  Description of Artificial Sequence: Synthetic oligonucleotide
uuagaauuuggcuuuggga

SEQ ID NO: 2613 - RNA, 19 nt, Artificial Sequence
  Description of Artificial Sequence: Synthetic oligonucleotide
agaagagaugcugccauuu

SEQ ID NO: 2614 - RNA, 19 nt, Artificial Sequence
  Description of Artificial Sequence: Synthetic oligonucleotide
uaaccccuugguacugaaa

SEQ ID NO: 2615 - RNA, 19 nt, Artificial Sequence
  Description of Artificial Sequence: Synthetic oligonucleotide
aaugagaaaauccccaacu

SEQ ID NO: 2616 - RNA, 19 nt, Artificial Sequence
  Description of Artificial Sequence: Synthetic oligonucleotide
uaugcaugccaagggguua

SEQ ID NO: 2617 - RNA, 19 nt, Artificial Sequence
  Description of Artificial Sequence: Synthetic oligonucleotide
aaugaaacaaauagcuguu

SEQ ID NO: 2618 - RNA, 19 nt, Artificial Sequence
  Description of Artificial Sequence: Synthetic oligonucleotide
ugacguuugcucauuuaag

SEQ ID NO: 2619 - RNA, 19 nt, Artificial Sequence
  Description of Artificial Sequence: Synthetic oligonucleotide
gaauuugaaacguuaugau

SEQ ID NO: 2620 - RNA, 19 nt, Artificial Sequence
  Description of Artificial Sequence: Synthetic oligonucleotide
ugaccuggcaacaaaaagu

SEQ ID NO: 2621 - RNA, 19 nt, Artificial Sequence
  Description of Artificial Sequence: Synthetic oligonucleotide
uaaugaagaaaauugagac

SEQ ID NO: 2622 - RNA, 19 nt, Artificial Sequence
  Description of Artificial Sequence: Synthetic oligonucleotide
ccugagugaagauaagaaa

SEQ ID NO: 2623 - RNA, 19 nt, Artificial Sequence
  Description of Artificial Sequence: Synthetic oligonucleotide
augaucuuuacguggcaaa

SEQ ID NO: 2624 - RNA, 19 nt, Artificial Sequence
  Description of Artificial Sequence: Synthetic oligonucleotide
aaugaacacaucuugagua

SEQ ID NO: 2625 - RNA, 19 nt, Artificial Sequence
  Description of Artificial Sequence: Synthetic oligonucleotide
auuuaggaaaugggcagug

SEQ ID NO: 2626 - RNA, 19 nt, Artificial Sequence
  Description of Artificial Sequence: Synthetic oligonucleotide
gaaggcuaagaaccuggug

SEQ ID NO: 2627 - RNA, 19 nt, Artificial Sequence
  Description of Artificial Sequence: Synthetic oligonucleotide
guguuucuugggaucaugg

SEQ ID NO: 2628 - RNA, 19 nt, Artificial Sequence
  Description of Artificial Sequence: Synthetic oligonucleotide
guacauuuaucacugaauu

SEQ ID NO: 2629 - RNA, 19 nt, Artificial Sequence
  Description of Artificial Sequence: Synthetic oligonucleotide
uaagccaucagggaaaaaa

SEQ ID NO: 2630 - RNA, 19 nt, Artificial Sequence
  Description of Artificial Sequence: Synthetic oligonucleotide
acaacaaaaaaagagaaca

SEQ ID NO: 2631 - RNA, 19 nt, Artificial Sequence
  Description of Artificial Sequence: Synthetic oligonucleotide
accuccagcuuuucuuuuu

SEQ ID NO: 2632 - RNA, 19 nt, Artificial Sequence
  Description of Artificial Sequence: Synthetic oligonucleotide
ucuguauauacucaugucc

SEQ ID NO: 2633 - RNA, 19 nt, Artificial Sequence
  Description of Artificial Sequence: Synthetic oligonucleotide
ccccagauuccaacauuuc

SEQ ID NO: 2634 - RNA, 19 nt, Artificial Sequence
  Description of Artificial Sequence: Synthetic oligonucleotide
cucacugaaagggggcaug

SEQ ID NO: 2635 - RNA, 19 nt, Artificial Sequence
  Description of Artificial Sequence: Synthetic oligonucleotide
guaugcaaaccucaucuuu

SEQ ID NO: 2636 - RNA, 19 nt, Artificial Sequence
  Description of Artificial Sequence: Synthetic oligonucleotide
ucuccuucauuaaugauga

SEQ ID NO: 2637 - RNA, 19 nt, Artificial Sequence
  Description of Artificial Sequence: Synthetic oligonucleotide
aucuucagauuaaacccuu

SEQ ID NO: 2638 - RNA, 19 nt, Artificial Sequence
  Description of Artificial Sequence: Synthetic oligonucleotide
uuggugcuaggagcugaca

SEQ ID NO: 2639 - RNA, 19 nt, Artificial Sequence
  Description of Artificial Sequence: Synthetic oligonucleotide
aauuuccaaagcagccugu

SEQ ID NO: 2640 - RNA, 19 nt, Artificial Sequence
  Description of Artificial Sequence: Synthetic oligonucleotide
ugaaguccuaggggcuggg

SEQ ID NO: 2641 - RNA, 19 nt, Artificial Sequence
  Description of Artificial Sequence: Synthetic oligonucleotide
gggccacucuugcggcaag

SEQ ID NO: 2642 - RNA, 19 nt, Artificial Sequence
  Description of Artificial Sequence: Synthetic oligonucleotide
gcagaaggccauccuacuc

SEQ ID NO: 2643 - RNA, 19 nt, Artificial Sequence
  Description of Artificial Sequence: Synthetic oligonucleotide
ccgcggagugaucauggaa

SEQ ID NO: 2644 - RNA, 19 nt, Artificial Sequence
  Description of Artificial Sequence: Synthetic oligonucleotide
aauguauuuuaguuaaacu

SEQ ID NO: 2645 - RNA, 19 nt, Artificial Sequence
  Description of Artificial Sequence: Synthetic oligonucleotide
ucugacagcucccaaacgg

SEQ ID NO: 2646 - RNA, 19 nt, Artificial Sequence
  Description of Artificial Sequence: Synthetic oligonucleotide
gaagacuacagcaugacgu

SEQ ID NO: 2647 - RNA, 19 nt, Artificial Sequence
  Description of Artificial Sequence: Synthetic oligonucleotide
uaguauuaugauugcauug

SEQ ID NO: 2648 - RNA, 19 nt, Artificial Sequence
  Description of Artificial Sequence: Synthetic oligonucleotide
guaugaaagagcaagugac

SEQ ID NO: 2649 - RNA, 19 nt, Artificial Sequence
  Description of Artificial Sequence: Synthetic oligonucleotide
cuuucuaaguaggaugaau

SEQ ID NO: 2650 - RNA, 19 nt, Artificial Sequence
  Description of Artificial Sequence: Synthetic oligonucleotide
ucauauucauaugcagaug

SEQ ID NO: 2651 - RNA, 19 nt, Artificial Sequence
  Description of Artificial Sequence: Synthetic oligonucleotide
gucuuagccucuugacgcu

SEQ ID NO: 2652 - RNA, 19 nt, Artificial Sequence
  Description of Artificial Sequence: Synthetic oligonucleotide
uggaaguguggauuuauag

SEQ ID NO: 2653 - RNA, 19 nt, Artificial Sequence
  Description of Artificial Sequence: Synthetic oligonucleotide
gcuaugaaaccacugcugg

SEQ ID NO: 2654 - RNA, 19 nt, Artificial Sequence
  Description of Artificial Sequence: Synthetic oligonucleotide
gcagugggugggccacugg

SEQ ID NO: 2655 - RNA, 19 nt, Artificial Sequence
  Description of Artificial Sequence: Synthetic oligonucleotide
ggacugacggggguuaaag

SEQ ID NO: 2656 - RNA, 19 nt, Artificial Sequence
  Description of Artificial Sequence: Synthetic oligonucleotide
gggcauuuuacuaaggcag

SEQ ID NO: 2657 - RNA, 19 nt, Artificial Sequence
  Description of Artificial Sequence: Synthetic oligonucleotide
gcuaagacauauucagaca

SEQ ID NO: 2658 - RNA, 19 nt, Artificial Sequence
  Description of Artificial Sequence: Synthetic oligonucleotide
aucaacguuauccuucuuu

SEQ ID NO: 2659 - RNA, 19 nt, Artificial Sequence
  Description of Artificial Sequence: Synthetic oligonucleotide
uuucauauuucuaccugag

SEQ ID NO: 2660 - RNA, 19 nt, Artificial Sequence
  Description of Artificial Sequence: Synthetic oligonucleotide
uauuucuaccugagugaag

SEQ ID NO: 2661 - RNA, 19 nt, Artificial Sequence
  Description of Artificial Sequence: Synthetic oligonucleotide
ccaccugaaaaaugucagc

SEQ ID NO: 2662 - RNA, 19 nt, Artificial Sequence
  Description of Artificial Sequence: Synthetic oligonucleotide
caaucagauuguggcaugc

SEQ ID NO: 2663 - RNA, 19 nt, Artificial Sequence
  Description of Artificial Sequence: Synthetic oligonucleotide
cuggguaacuggaaaaaau

SEQ ID NO: 2664 - RNA, 19 nt, Artificial Sequence
  Description of Artificial Sequence: Synthetic oligonucleotide
uaauaaaaaucggcuuccu

SEQ ID NO: 2665 - RNA, 19 nt, Artificial Sequence
  Description of Artificial Sequence: Synthetic oligonucleotide
uacagccagcagcacaguc

SEQ ID NO: 2666 - RNA, 19 nt, Artificial Sequence
  Description of Artificial Sequence: Synthetic oligonucleotide
cacccauggaacuguuggc

SEQ ID NO: 2667 - RNA, 19 nt, Artificial Sequence
  Description of Artificial Sequence: Synthetic oligonucleotide
cuuuggauuaaauguggaa

SEQ ID NO: 2668 - RNA, 19 nt, Artificial Sequence
  Description of Artificial Sequence: Synthetic oligonucleotide
auugaacgacuacccagaa

SEQ ID NO: 2669 - RNA, 19 nt, Artificial Sequence
  Description of Artificial Sequence: Synthetic oligonucleotide
aguguucuggaaagaagcg

SEQ ID NO: 2670 - RNA, 19 nt, Artificial Sequence
  Description of Artificial Sequence: Synthetic oligonucleotide
gagauguguggccugccuc

SEQ ID NO: 2671 - RNA, 19 nt, Artificial Sequence
  Description of Artificial Sequence: Synthetic oligonucleotide
caccguccucacccaucaa

SEQ ID NO: 2672 - RNA, 19 nt, Artificial Sequence
  Description of Artificial Sequence: Synthetic oligonucleotide
aaagcaccagcaggcacgu

SEQ ID NO: 2673 - RNA, 19 nt, Artificial Sequence
  Description of Artificial Sequence: Synthetic oligonucleotide
uuaacucgaauucucacaa

SEQ ID NO: 2674 - RNA, 19 nt, Artificial Sequence
  Description of Artificial Sequence: Synthetic oligonucleotide
aggaaaaggccauuaaagc

SEQ ID NO: 2675 - RNA, 19 nt, Artificial Sequence
  Description of Artificial Sequence: Synthetic oligonucleotide
cucaaggugcauuucaaac

SEQ ID NO: 2676 - RNA, 19 nt, Artificial Sequence
  Description of Artificial Sequence: Synthetic oligonucleotide
auuucaaacuccaggcuac

SEQ ID NO: 2677 - RNA, 25 nt, Artificial Sequence
  Description of Artificial Sequence: Synthetic oligonucleotide
gcagcagcagagaauccaaacccua

SEQ ID NO: 2678 - RNA, 25 nt, Artificial Sequence
  Description of Artificial Sequence: Synthetic oligonucleotide
aaagcugauaucacaaaguaccauu

SEQ ID NO: 2679 - RNA, 25 nt, Artificial Sequence
  Description of Artificial Sequence: Synthetic oligonucleotide
uucuccaaguugggggcucagaggg

SEQ ID NO: 2680 - RNA, 25 nt, Artificial Sequence
  Description of Artificial Sequence: Synthetic oligonucleotide
ggagucaucaugagcgauguuacca

SEQ ID NO: 2681 - RNA, 25 nt, Artificial Sequence
  Description of Artificial Sequence: Synthetic oligonucleotide
auugugaaagaagguuggguucaga

SEQ ID NO: 2682 - RNA, 25 nt, Artificial Sequence
  Description of Artificial Sequence: Synthetic oligonucleotide
aagaggggagaauauauaaaaaacu

SEQ ID NO: 2683 - RNA, 25 nt, Artificial Sequence
  Description of Artificial Sequence: Synthetic oligonucleotide
uggaggccaagauacuuccuuuuga

SEQ ID NO: 2684 - RNA, 25 nt, Artificial Sequence
  Description of Artificial Sequence: Synthetic oligonucleotide
aagacagauggcucauucauaggau

SEQ ID NO: 2685 - RNA, 25 nt, Artificial Sequence
  Description of Artificial Sequence: Synthetic oligonucleotide
uauaaagagaaaccucaagaugugg

SEQ ID NO: 2686 - RNA, 25 nt, Artificial Sequence
  Description of Artificial Sequence: Synthetic oligonucleotide
gauuuaccuuauccccucaacaacu

SEQ ID NO: 2687 - RNA, 25 nt, Artificial Sequence
  Description of Artificial Sequence: Synthetic oligonucleotide
uuuucaguggcaaaaugccaguuaa

SEQ ID NO: 2688 - RNA, 25 nt, Artificial Sequence
  Description of Artificial Sequence: Synthetic oligonucleotide
augaaaacagaacgaccaaagccaa

SEQ ID NO: 2689 - RNA, 25 nt, Artificial Sequence
  Description of Artificial Sequence: Synthetic oligonucleotide
aacacauuuauaaucagaugucucc

SEQ ID NO: 2690 - RNA, 25 nt, Artificial Sequence
  Description of Artificial Sequence: Synthetic oligonucleotide
caguggacuacuguuauagagagaa

SEQ ID NO: 2691 - RNA, 25 nt, Artificial Sequence
  Description of Artificial Sequence: Synthetic oligonucleotide
acauuucauguagauacuccagagg

SEQ ID NO: 2692 - RNA, 25 nt, Artificial Sequence
  Description of Artificial Sequence: Synthetic oligonucleotide
gaaagggaagaauggacagaagcua

SEQ ID NO: 2693 - RNA, 25 nt, Artificial Sequence
  Description of Artificial Sequence: Synthetic oligonucleotide
auccaggcuguagcagacagacugc

SEQ ID NO: 2694 - RNA, 25 nt, Artificial Sequence
  Description of Artificial Sequence: Synthetic oligonucleotide
cagaggcaagaagaggagagaauga

SEQ ID NO: 2695 - RNA, 25 nt, Artificial Sequence
  Description of Artificial Sequence: Synthetic oligonucleotide
aauuguaguccaacuucacaaauug

SEQ ID NO: 2696 - RNA, 25 nt, Artificial Sequence
  Description of Artificial Sequence: Synthetic oligonucleotide
gauaauauaggagaggaagagaugg

SEQ ID NO: 2697 - RNA, 25 nt, Artificial Sequence
  Description of Artificial Sequence: Synthetic oligonucleotide
gaugccucuacaacccaucauaaaa

SEQ ID NO: 2698 - RNA, 25 nt, Artificial Sequence
  Description of Artificial Sequence: Synthetic oligonucleotide
agaaagacaaugaaugauuuugacu

SEQ ID NO: 2699 - RNA, 25 nt, Artificial Sequence
  Description of Artificial Sequence: Synthetic oligonucleotide
uauuugaaacuacuagguaaaggca

SEQ ID NO: 2700 - RNA, 25 nt, Artificial Sequence
  Description of Artificial Sequence: Synthetic oligonucleotide
acuuuugggaaaguuauuuugguuc

SEQ ID NO: 2701 - RNA, 25 nt, Artificial Sequence
  Description of Artificial Sequence: Synthetic oligonucleotide
cgagagaaggcaaguggaaaauacu

SEQ ID NO: 2702 - RNA, 25 nt, Artificial Sequence
  Description of Artificial Sequence: Synthetic oligonucleotide
uaugcuaugaagauucugaagaaag

SEQ ID NO: 2703 - RNA, 25 nt, Artificial Sequence
  Description of Artificial Sequence: Synthetic oligonucleotide
gaagucauuauugcaaaggaugaag

SEQ ID NO: 2704 - RNA, 25 nt, Artificial Sequence
  Description of Artificial Sequence: Synthetic oligonucleotide
guggcacacacucuaacugaaagca

SEQ ID NO: 2705 - RNA, 25 nt, Artificial Sequence
  Description of Artificial Sequence: Synthetic oligonucleotide
agaguauuaaagaacacuagacauc

SEQ ID NO: 2706 - RNA, 25 nt, Artificial Sequence
  Description of Artificial Sequence: Synthetic oligonucleotide
cccuuuuuaacauccuugaaauauu

SEQ ID NO: 2707 - RNA, 25 nt, Artificial Sequence
  Description of Artificial Sequence: Synthetic oligonucleotide
uccuuccagacaaaagaccguuugu

SEQ ID NO: 2708 - RNA, 25 nt, Artificial Sequence
  Description of Artificial Sequence: Synthetic oligonucleotide
uguuuugugauggaauauguuaaug

SEQ ID NO: 2709 - RNA, 25 nt, Artificial Sequence
  Description of Artificial Sequence: Synthetic oligonucleotide
gggggcgagcuguuuuuccauuugu

SEQ ID NO: 2710 - RNA, 25 nt, Artificial Sequence
  Description of Artificial Sequence: Synthetic oligonucleotide
ucgagagagcggguguucucugagg

SEQ ID NO: 2711 - RNA, 25 nt, Artificial Sequence
  Description of Artificial Sequence: Synthetic oligonucleotide
gaccgcacacguuucuauggugcag

SEQ ID NO: 2712 - RNA, 25 nt, Artificial Sequence
  Description of Artificial Sequence: Synthetic oligonucleotide
gaaauugucucugccuuggacuauc

SEQ ID NO: 2713 - RNA, 25 nt, Artificial Sequence
  Description of Artificial Sequence: Synthetic oligonucleotide
cuacauuccggaaagauuguguacc

SEQ ID NO: 2714 - RNA, 25 nt, Artificial Sequence
  Description of Artificial Sequence: Synthetic oligonucleotide
cgugaucucaaguuggagaaucuaa

SEQ ID NO: 2715 - RNA, 25 nt, Artificial Sequence
  Description of Artificial Sequence: Synthetic oligonucleotide
augcuggacaaagauggccacauaa

SEQ ID NO: 2716 - RNA, 25 nt, Artificial Sequence
  Description of Artificial Sequence: Synthetic oligonucleotide
aaaauuacagauuuuggacuuugca

SEQ ID NO: 2717 - RNA, 25 nt, Artificial Sequence
  Description of Artificial Sequence: Synthetic oligonucleotide
aaagaagggaucacagaugcagcca

SEQ ID NO: 2718 - RNA, 25 nt, Artificial Sequence
  Description of Artificial Sequence: Synthetic oligonucleotide
accaugaagacauucuguggcacuc

SEQ ID NO: 2719 - RNA, 25 nt, Artificial Sequence
  Description of Artificial Sequence: Synthetic oligonucleotide
ccagaauaucuggcaccagaggugu

SEQ ID NO: 2720 - RNA, 25 nt, Artificial Sequence
  Description of Artificial Sequence: Synthetic oligonucleotide
uuagaagauaaugacuauggccgag

SEQ ID NO: 2721 - RNA, 25 nt, Artificial Sequence
  Description of Artificial Sequence: Synthetic oligonucleotide
gcaguagacugguggggccuagggg

SEQ ID NO: 2722 - RNA, 25 nt, Artificial Sequence
  Description of Artificial Sequence: Synthetic oligonucleotide
guugucauguaugaaaugaugugug

SEQ ID NO: 2723 - RNA, 25 nt, Artificial Sequence
  Description of Artificial Sequence: Synthetic oligonucleotide
gggagguuaccuuucuacaaccagg

SEQ ID NO: 2724 - RNA, 25 nt, Artificial Sequence
  Description of Artificial Sequence: Synthetic oligonucleotide
gaccaugagaaacuuuuugaauuaa

SEQ ID NO: 2725 - RNA, 25 nt, Artificial Sequence
  Description of Artificial Sequence: Synthetic oligonucleotide
auauuaauggaagacauuaaauuuc

SEQ ID NO: 2726 - RNA, 25 nt, Artificial Sequence
  Description of Artificial Sequence: Synthetic oligonucleotide
ccucgaacacucucuucagaugcaa

SEQ ID NO: 2727 - RNA, 25 nt, Artificial Sequence
  Description of Artificial Sequence: Synthetic oligonucleotide
aaaucauugcuuucagggcucuuga

SEQ ID NO: 2728 - RNA, 25 nt, Artificial Sequence
  Description of Artificial Sequence: Synthetic oligonucleotide
auaaaggauccaaauaaacgccuug

SEQ ID NO: 2729 - RNA, 25 nt, Artificial Sequence
  Description of Artificial Sequence: Synthetic oligonucleotide
gguggaggaccagaugaugcaaaag

SEQ ID NO: 2730 - RNA, 25 nt, Artificial Sequence
  Description of Artificial Sequence: Synthetic oligonucleotide
gaaauuaugagacacaguuucuucu

SEQ ID NO: 2731 - RNA, 25 nt, Artificial Sequence
  Description of Artificial Sequence: Synthetic oligonucleotide
ucuggaguaaacuggcaagauguau

SEQ ID NO: 2732 - RNA, 25 nt, Artificial Sequence
  Description of Artificial Sequence: Synthetic oligonucleotide
uaugauaaaaagcuuguaccuccuu

SEQ ID NO: 2733 - RNA, 25 nt, Artificial Sequence
  Description of Artificial Sequence: Synthetic oligonucleotide
uuuaaaccucaaguaacaucugaga

SEQ ID NO: 2734 - RNA, 25 nt, Artificial Sequence
  Description of Artificial Sequence: Synthetic oligonucleotide
acagauacuagauauuuugaugaag

SEQ ID NO: 2735 - RNA, 25 nt, Artificial Sequence
  Description of Artificial Sequence: Synthetic oligonucleotide
gaauuuacagcucagacuauuacaa

SEQ ID NO: 2736 - RNA, 25 nt, Artificial Sequence
  Description of Artificial Sequence: Synthetic oligonucleotide
auaacaccaccugaaaaauaugaug

SEQ ID NO: 2737 - RNA, 25 nt, Artificial Sequence
  Description of Artificial Sequence: Synthetic oligonucleotide
gaggaugguauggacugcauggaca

SEQ ID NO: 2738 - RNA, 25 nt, Artificial Sequence
  Description of Artificial Sequence: Synthetic oligonucleotide
aaugagaggcggccgcauuucccuc

SEQ ID NO: 2739 - RNA, 25 nt, Artificial Sequence
  Description of Artificial Sequence: Synthetic oligonucleotide
caauuuuccuacucugcaaguggac

SEQ ID NO: 2740 - RNA, 25 nt, Artificial Sequence
  Description of Artificial Sequence: Synthetic oligonucleotide
cgagaauaagucucuuucauucugc

SEQ ID NO: 2741 - RNA, 25 nt, Artificial Sequence
  Description of Artificial Sequence: Synthetic oligonucleotide
cuacuucacugucaucuucaauuua

SEQ ID NO: 2742 - RNA, 25 nt, Artificial Sequence
  Description of Artificial Sequence: Synthetic oligonucleotide
auuacugaaaaugauuccuggacau

SEQ ID NO: 2743 - RNA, 25 nt, Artificial Sequence
  Description of Artificial Sequence: Synthetic oligonucleotide
ucaccaguccuagcucuuacacaua

SEQ ID NO: 2744 - RNA, 25 nt, Artificial Sequence
  Description of Artificial Sequence: Synthetic oligonucleotide
agcaggggcaccuuccgacauccca

SEQ ID NO: 2745 - RNA, 25 nt, Artificial Sequence
  Description of Artificial Sequence: Synthetic oligonucleotide
agaccagccaaggguccucaccccu

SEQ ID NO: 2746 - RNA, 25 nt, Artificial Sequence
  Description of Artificial Sequence: Synthetic oligonucleotide
ucgccaccuuucacccucaugaaaa

SEQ ID NO: 2747 - RNA, 25 nt, Artificial Sequence
  Description of Artificial Sequence: Synthetic oligonucleotide
acacacauacacgcaaauacacucc

SEQ ID NO: 2748 - RNA, 25 nt, Artificial Sequence
  Description of Artificial Sequence: Synthetic oligonucleotide
caguuuuuguuuuugcaugaaauug

SEQ ID NO: 2749 - RNA, 25 nt, Artificial Sequence
  Description of Artificial Sequence: Synthetic oligonucleotide
guaucucagucuaaggucucaugcu

SEQ ID NO: 2750 - RNA, 25 nt, Artificial Sequence
  Description of Artificial Sequence: Synthetic oligonucleotide
uguugcugcuacugucuuacuauua

SEQ ID NO: 2751 - RNA, 25 nt, Artificial Sequence
  Description of Artificial Sequence: Synthetic oligonucleotide
auagcaacuuuaagaaguaauuuuc

SEQ ID NO: 2752 - RNA, 25 nt, Artificial Sequence
  Description of Artificial Sequence: Synthetic oligonucleotide
ccaaccuuuggaagucaugagccca

SEQ ID NO: 2753 - RNA, 25 nt, Artificial Sequence
  Description of Artificial Sequence: Synthetic oligonucleotide
accauuguucauuugugcaccaauu

SEQ ID NO: 2754 - RNA, 25 nt, Artificial Sequence
  Description of Artificial Sequence: Synthetic oligonucleotide
uaucaucuuuugaucuuuuaguuuu

SEQ ID NO: 2755 - RNA, 25 nt, Artificial Sequence
  Description of Artificial Sequence: Synthetic oligonucleotide
uucccucagugaaggcuaaaugaga

SEQ ID NO: 2756 - RNA, 25 nt, Artificial Sequence
  Description of Artificial Sequence: Synthetic oligonucleotide
auacacugauucuagguacauuuuu

SEQ ID NO: 2757 - RNA, 25 nt, Artificial Sequence
  Description of Artificial Sequence: Synthetic oligonucleotide
uuaacuuucuagaagagaaaaacua

SEQ ID NO: 2758 - RNA, 25 nt, Artificial Sequence
  Description of Artificial Sequence: Synthetic oligonucleotide
aacuagacuaagaagauuuaguuua

SEQ ID NO: 2759 - RNA, 25 nt, Artificial Sequence
  Description of Artificial Sequence: Synthetic oligonucleotide
auaaauucagaacaagcaauugugg

SEQ ID NO: 2760 - RNA, 25 nt, Artificial Sequence
  Description of Artificial Sequence: Synthetic oligonucleotide
gaagggugguggcgugcauauguaa

SEQ ID NO: 2761 - RNA, 25 nt, Artificial Sequence
  Description of Artificial Sequence: Synthetic oligonucleotide
aagcacaucagauccgugcgugaag

SEQ ID NO: 2762 - RNA, 25 nt, Artificial Sequence
  Description of Artificial Sequence: Synthetic oligonucleotide
guaggcauauaucacuaagcugugg

SEQ ID NO: 2763 - RNA, 25 nt, Artificial Sequence
  Description of Artificial Sequence: Synthetic oligonucleotide
gcuggaauugauuaggaagcauuug

SEQ ID NO: 2764 - RNA, 25 nt, Artificial Sequence
  Description of Artificial Sequence: Synthetic oligonucleotide
gguagaaggacugaacaacuguugg

SEQ ID NO: 2765 - RNA, 25 nt, Artificial Sequence
  Description of Artificial Sequence: Synthetic oligonucleotide
ggauauauauauauauauauaauuu

SEQ ID NO: 2766 - RNA, 25 nt, Artificial Sequence
  Description of Artificial Sequence: Synthetic oligonucleotide
uacuguagaagaagcccauaucaca

SEQ ID NO: 2767 - RNA, 25 nt, Artificial Sequence
  Description of Artificial Sequence: Synthetic oligonucleotide
auguggaugucgagacuucacgggc

SEQ ID NO: 2768 - RNA, 25 nt, Artificial Sequence
  Description of Artificial Sequence: Synthetic oligonucleotide
caaucaugagcaagugaacacuguu

SEQ ID NO: 2769 - RNA, 25 nt, Artificial Sequence
  Description of Artificial Sequence: Synthetic oligonucleotide
ucuaccaagaacugaaggcauaugc

SEQ ID NO: 2770 - RNA, 25 nt, Artificial Sequence
  Description of Artificial Sequence: Synthetic oligonucleotide
cacagucaaggucacuuaaaggguc

SEQ ID NO: 2771 - RNA, 25 nt, Artificial Sequence
  Description of Artificial Sequence: Synthetic oligonucleotide
cuuaugaaacaauuugagccagaga

SEQ ID NO: 2772 - RNA, 25 nt, Artificial Sequence
  Description of Artificial Sequence: Synthetic oligonucleotide
agcaucuuuccccugugcuuggaaa

SEQ ID NO: 2773 - RNA, 25 nt, Artificial Sequence
  Description of Artificial Sequence: Synthetic oligonucleotide
accuuuuuuccuucuugacauuuau

SEQ ID NO: 2774 - RNA, 25 nt, Artificial Sequence
  Description of Artificial Sequence: Synthetic oligonucleotide
ucaccucugauggcugaagaaugua

SEQ ID NO: 2775 - RNA, 25 nt, Artificial Sequence
  Description of Artificial Sequence: Synthetic oligonucleotide
agacagguauaaugauacugcuuuu

SEQ ID NO: 2776 - RNA, 25 nt, Artificial Sequence
  Description of Artificial Sequence: Synthetic oligonucleotide
ucaccaaaauuucuacaccaaggua

SEQ ID NO: 2777 - RNA, 25 nt, Artificial Sequence
  Description of Artificial Sequence: Synthetic oligonucleotide
aaacagguguuugccuuauuuaauu

SEQ ID NO: 2778 - RNA, 25 nt, Artificial Sequence
  Description of Artificial Sequence: Synthetic oligonucleotide
uuuuuacuuucaguucuacgugaau

SEQ ID NO: 2779 - RNA, 25 nt, Artificial Sequence
  Description of Artificial Sequence: Synthetic oligonucleotide
uuagcuuuuucucagauguugaaac

SEQ ID NO: 2780 - RNA, 25 nt, Artificial Sequence
  Description of Artificial Sequence: Synthetic oligonucleotide
cuuugaauguccuuuuaugauuuug

SEQ ID NO: 2781 - RNA, 25 nt, Artificial Sequence
  Description of Artificial Sequence: Synthetic oligonucleotide
guuuauauugcaguaguauuuauuu

SEQ ID NO: 2782 - RNA, 25 nt, Artificial Sequence
  Description of Artificial Sequence: Synthetic oligonucleotide
uuuuagugaugagaauuguauguca

SEQ ID NO: 2783 - RNA, 25 nt, Artificial Sequence
  Description of Artificial Sequence: Synthetic oligonucleotide
auguuagcaaacgcagcuccaacuu

SEQ ID NO: 2784 - RNA, 25 nt, Artificial Sequence
  Description of Artificial Sequence: Synthetic oligonucleotide
uauauaaaauagacuuacugcaguu

SEQ ID NO: 2785 - RNA, 25 nt, Artificial Sequence
  Description of Artificial Sequence: Synthetic oligonucleotide
uacuuuugacccaugugcaaggauu

SEQ ID NO: 2786 - RNA, 25 nt, Artificial Sequence
  Description of Artificial Sequence: Synthetic oligonucleotide
uguacacgcugaugagaaucaugca

SEQ ID NO: 2787 - RNA, 25 nt, Artificial Sequence
  Description of Artificial Sequence: Synthetic oligonucleotide
acuuuuucuccucuguuaaaaaaaa

SEQ ID NO: 2788 - RNA, 25 nt, Artificial Sequence
  Description of Artificial Sequence: Synthetic oligonucleotide
augauaaggcucugaaauggaauau

SEQ ID NO: 2789 - RNA, 25 nt, Artificial Sequence
  Description of Artificial Sequence: Synthetic oligonucleotide
uauugguuagaauuuggcuuuggga

SEQ ID NO: 2790 - RNA, 25 nt, Artificial Sequence
  Description of Artificial Sequence: Synthetic oligonucleotide
agaagagaugcugccauuuaacccc

SEQ ID NO: 2791 - RNA, 25 nt, Artificial Sequence
  Description of Artificial Sequence: Synthetic oligonucleotide
cuugguacugaaaaugagaaaaucc

SEQ ID NO: 2792 - RNA, 25 nt, Artificial Sequence
  Description of Artificial Sequence: Synthetic oligonucleotide
cccaacuaugcaugccaagggguua

SEQ ID NO: 2793 - RNA, 25 nt, Artificial Sequence
  Description of Artificial Sequence: Synthetic oligonucleotide
aaugaaacaaauagcuguugacguu

SEQ ID NO: 2794 - RNA, 25 nt, Artificial Sequence
  Description of Artificial Sequence: Synthetic oligonucleotide
uugcucauuuaagaauuugaaacgu

SEQ ID NO: 2795 - RNA, 25 nt, Artificial Sequence
  Description of Artificial Sequence: Synthetic oligonucleotide
uuaugaugaccuggcaacaaaaagu

SEQ ID NO: 2796 - RNA, 25 nt, Artificial Sequence
  Description of Artificial Sequence: Synthetic oligonucleotide
uaaugaagaaaauugagaccugagu

SEQ ID NO: 2797 - RNA, 25 nt, Artificial Sequence
  Description of Artificial Sequence: Synthetic oligonucleotide
ugaagauaagaaaugaucuuuacgu

SEQ ID NO: 2798 - RNA, 25 nt, Artificial Sequence
  Description of Artificial Sequence: Synthetic oligonucleotide
uggcaaaaugaacacaucuugagua

SEQ ID NO: 2799 - RNA, 25 nt, Artificial Sequence
  Description of Artificial Sequence: Synthetic oligonucleotide
auuuaggaaaugggcagugaaggcu

SEQ ID NO: 2800 - RNA, 25 nt, Artificial Sequence
  Description of Artificial Sequence: Synthetic oligonucleotide
uaagaaccugguguguuucuuggga

SEQ ID NO: 2801 - RNA, 25 nt, Artificial Sequence
  Description of Artificial Sequence: Synthetic oligonucleotide
aucaugguacauuuaucacugaauu

SEQ ID NO: 2802 - RNA, 25 nt, Artificial Sequence
  Description of Artificial Sequence: Synthetic oligonucleotide
uaagccaucagggaaaaaacaacaa

SEQ ID NO: 2803 - RNA, 25 nt, Artificial Sequence
  Description of Artificial Sequence: Synthetic oligonucleotide
aaaaaagagaacaccuccagcuuuu

SEQ ID NO: 2804 - RNA, 25 nt, Artificial Sequence
  Description of Artificial Sequence: Synthetic oligonucleotide
ucuuuuucuguauauacucaugucc

SEQ ID NO: 2805 - RNA, 25 nt, Artificial Sequence
  Description of Artificial Sequence: Synthetic oligonucleotide
ccccagauuccaacauuucucacug

SEQ ID NO: 2806 - RNA, 25 nt, Artificial Sequence
  Description of Artificial Sequence: Synthetic oligonucleotide
gaaagggggcauguaugcaaaccuc

SEQ ID NO: 2807 - RNA, 25 nt, Artificial Sequence
  Description of Artificial Sequence: Synthetic oligonucleotide
caucuuucuccuucauuaaugauga

SEQ ID NO: 2808 - RNA, 25 nt, Artificial Sequence
  Description of Artificial Sequence: Synthetic oligonucleotide
aucuucagauuaaacccuuuggugc

SEQ ID NO: 2809 - RNA, 25 nt, Artificial Sequence
  Description of Artificial Sequence: Synthetic oligonucleotide
cuaggagcugacaauuuccaaagca

SEQ ID NO: 2810 - RNA, 25 nt, Artificial Sequence
  Description of Artificial Sequence: Synthetic oligonucleotide
agccugugaaguccuaggggcuggg

SEQ ID NO: 2811 - RNA, 25 nt, Artificial Sequence
  Description of Artificial Sequence: Synthetic oligonucleotide
gggccacucuugcggcaagcagaag

SEQ ID NO: 2812 - RNA, 25 nt, Artificial Sequence
  Description of Artificial Sequence: Synthetic oligonucleotide
ggccauccuacuccgcggagugauc

SEQ ID NO: 2813 - RNA, 25 nt, Artificial Sequence
  Description of Artificial Sequence: Synthetic oligonucleotide
cauggaaauguauuuuaguuaaacu

SEQ ID NO: 2814 - RNA, 25 nt, Artificial Sequence
  Description of Artificial Sequence: Synthetic oligonucleotide
ucugacagcucccaaacggaagacu

SEQ ID NO: 2815 - RNA, 25 nt, Artificial Sequence
  Description of Artificial Sequence: Synthetic oligonucleotide
uacagcaugacguaguauuaugauu

SEQ ID NO: 2816 - RNA, 25 nt, Artificial Sequence
  Description of Artificial Sequence: Synthetic oligonucleotide
ugcauuguaugaaagagcaagugac

SEQ ID NO: 2817 - RNA, 25 nt, Artificial Sequence
  Description of Artificial Sequence: Synthetic oligonucleotide
cuuucuaaguaggaugaaucauauu

SEQ ID NO: 2818 - RNA, 25 nt, Artificial Sequence
  Description of Artificial Sequence: Synthetic oligonucleotide
ucauaugcagaugucuuagccucuu

SEQ ID NO: 2819 - RNA, 25 nt, Artificial Sequence
  Description of Artificial Sequence: Synthetic oligonucleotide
ugacgcuggaaguguggauuuauag

SEQ ID NO: 2820 - RNA, 25 nt, Artificial Sequence
  Description of Artificial Sequence: Synthetic oligonucleotide
gcuaugaaaccacugcuggcagugg

SEQ ID NO: 2821 - RNA, 25 nt, Artificial Sequence
  Description of Artificial Sequence: Synthetic oligonucleotide
ggugggccacugggacugacggggg

SEQ ID NO: 2822 - RNA, 25 nt, Artificial Sequence
  Description of Artificial Sequence: Synthetic oligonucleotide
guuaaagggcauuuuacuaaggcag

SEQ ID NO: 2823 - RNA, 25 nt, Artificial Sequence
  Description of Artificial Sequence: Synthetic oligonucleotide
gcuaagacauauucagacaucaacg

SEQ ID NO: 2824 - RNA, 25 nt, Artificial Sequence
  Description of Artificial Sequence: Synthetic oligonucleotide
guuauccuucuuuuucauauuucua

SEQ ID NO: 2825 - RNA, 25 nt, Artificial Sequence
  Description of Artificial Sequence: Synthetic oligonucleotide
uuuucauauuucuaccugagugaag

SEQ ID NO: 2826 - RNA, 25 nt, Artificial Sequence
  Description of Artificial Sequence: Synthetic oligonucleotide
auaacaccaccugaaaaaugucagc

SEQ ID NO: 2827 - RNA, 25 nt, Artificial Sequence
  Description of Artificial Sequence: Synthetic oligonucleotide
caaucagauuguggcaugcugggua

SEQ ID NO: 2828 - RNA, 25 nt, Artificial Sequence
  Description of Artificial Sequence: Synthetic oligonucleotide
aacuggaaaaaauaauaaaaaucgg

SEQ ID NO: 2829 - RNA, 25 nt, Artificial Sequence
  Description of Artificial Sequence: Synthetic oligonucleotide
gcuuccuacagccagcagcacaguc

SEQ ID NO: 2830 - RNA, 25 nt, Artificial Sequence
  Description of Artificial Sequence: Synthetic oligonucleotide
cacccauggaacuguuggcuuugga

SEQ ID NO: 2831 - RNA, 25 nt, Artificial Sequence
  Description of Artificial Sequence: Synthetic oligonucleotide
auuaaauguggaauugaacgacuac

SEQ ID NO: 2832 - RNA, 25 nt, Artificial Sequence
  Description of Artificial Sequence: Synthetic oligonucleotide
cccagaaguguucuggaaagaagcg

SEQ ID NO: 2833 - RNA, 25 nt, Artificial Sequence
  Description of Artificial Sequence: Synthetic oligonucleotide
gagauguguggccugccucaccguc

SEQ ID NO: 2834 - RNA, 25 nt, Artificial Sequence
  Description of Artificial Sequence: Synthetic oligonucleotide
ccucacccaucaaaagcaccagcag

SEQ ID NO: 2835 - RNA, 25 nt, Artificial Sequence
  Description of Artificial Sequence: Synthetic oligonucleotide
ggcacguuaacucgaauucucacaa

SEQ ID NO: 2836 - RNA, 25 nt, Artificial Sequence
  Description of Artificial Sequence: Synthetic oligonucleotide
aggaaaaggccauuaaagcucaagg

SEQ ID NO: 2837 - RNA, 25 nt, Artificial Sequence
  Description of Artificial Sequence: Synthetic oligonucleotide
aggugcauuucaaacuccaggcuac

SEQ ID NO: 2838 - RNA, 19 nt, Artificial Sequence
  Description of Artificial Sequence: Synthetic oligonucleotide
aagaaggaccccaagcaga

SEQ ID NO: 2839 - RNA, 19 nt, Artificial Sequence
  Description of Artificial Sequence: Synthetic oligonucleotide
aaggaccccaagcagaggc

SEQ ID NO: 2840 - RNA, 19 nt, Artificial Sequence
  Description of Artificial Sequence: Synthetic oligonucleotide
accccaagcagaggcuugg

SEQ ID NO: 2841 - RNA, 19 nt, Artificial Sequence
  Description of Artificial Sequence: Synthetic oligonucleotide
accugucccgggagcgugu

SEQ ID NO: 2842 - RNA, 19 nt, Artificial Sequence
  Description of Artificial Sequence: Synthetic oligonucleotide
acuacgccaugaagauccu

SEQ ID NO: 2843 - RNA, 19 nt, Artificial Sequence
  Description of Artificial Sequence: Synthetic oligonucleotide
acuucccccaguucuccua

SEQ ID NO: 2844 - RNA, 19 nt, Artificial Sequence
  Description of Artificial Sequence: Synthetic oligonucleotide
agaaggaccccaagcagag

SEQ ID NO: 2845 - RNA, 19 nt, Artificial Sequence
  Description of Artificial Sequence: Synthetic oligonucleotide
agauccgcuucccgcgcac

SEQ ID NO: 2846 - RNA, 19 nt, Artificial Sequence
  Description of Artificial Sequence: Synthetic oligonucleotide
agcuguucuuccaccuguc

SEQ ID NO: 2847 - RNA, 19 nt, Artificial Sequence
  Description of Artificial Sequence: Synthetic oligonucleotide
aggugcuggaggacaauga

SEQ ID NO: 2848 - RNA, 19 nt, Artificial Sequence
  Description of Artificial Sequence: Synthetic oligonucleotide
aguucuccuacucggccag

SEQ ID NO: 2849 - RNA, 19 nt, Artificial Sequence
  Description of Artificial Sequence: Synthetic oligonucleotide
auccgcuucccgcgcacgc

SEQ ID NO: 2850 - RNA, 19 nt, Artificial Sequence
  Description of Artificial Sequence: Synthetic oligonucleotide
auguacgagaugaugugcg

SEQ ID NO: 2851 - RNA, 19 nt, Artificial Sequence
  Description of Artificial Sequence: Synthetic oligonucleotide
caccugucccgggagcgug

SEQ ID NO: 2852 - RNA, 19 nt, Artificial Sequence
  Description of Artificial Sequence: Synthetic oligonucleotide
cacuucccccaguucuccu

SEQ ID NO: 2853 - RNA, 19 nt, Artificial Sequence
  Description of Artificial Sequence: Synthetic oligonucleotide
caguucuccuacucggcca

SEQ ID NO: 2854 - RNA, 19 nt, Artificial Sequence
  Description of Artificial Sequence: Synthetic oligonucleotide
ccacuucccccaguucucc

SEQ ID NO: 2855 - RNA, 19 nt, Artificial Sequence
  Description of Artificial Sequence: Synthetic oligonucleotide
cccacuucccccaguucuc

SEQ ID NO: 2856 - RNA, 19 nt, Artificial Sequence
  Description of Artificial Sequence: Synthetic oligonucleotide
ccccaguucuccuacucgg

SEQ ID NO: 2857 - RNA, 19 nt, Artificial Sequence
  Description of Artificial Sequence: Synthetic oligonucleotide
cccuucuacaaccaggacc

SEQ ID NO: 2858 - RNA, 19 nt, Artificial Sequence
  Description of Artificial Sequence: Synthetic oligonucleotide
ccgcuacuacgccaugaag

SEQ ID NO: 2859 - RNA, 19 nt, Artificial Sequence
  Description of Artificial Sequence: Synthetic oligonucleotide
ccugcccuucuacaaccag

SEQ ID NO: 2860 - RNA, 19 nt, Artificial Sequence
  Description of Artificial Sequence: Synthetic oligonucleotide
ccuucuacaaccaggacca

SEQ ID NO: 2861 - RNA, 19 nt, Artificial Sequence
  Description of Artificial Sequence: Synthetic oligonucleotide
cgccugcccuucuacaacc

SEQ ID NO: 2862 - RNA, 19 nt, Artificial Sequence
  Description of Artificial Sequence: Synthetic oligonucleotide
cgcuacuacgccaugaaga

SEQ ID NO: 2863 - RNA, 19 nt, Artificial Sequence
  Description of Artificial Sequence: Synthetic oligonucleotide
cgcugccugcaguggacca

SEQ ID NO: 2864 - RNA, 19 nt, Artificial Sequence
  Description of Artificial Sequence: Synthetic oligonucleotide
cuacuacgccaugaagauc

SEQ ID NO: 2865 - RNA, 19 nt, Artificial Sequence
  Description of Artificial Sequence: Synthetic oligonucleotide
cugcccuucuacaaccagg

SEQ ID NO: 2866 - RNA, 19 nt, Artificial Sequence
  Description of Artificial Sequence: Synthetic oligonucleotide
cuguucuuccaccuguccc

SEQ ID NO: 2867 - RNA, 19 nt, Artificial Sequence
  Description of Artificial Sequence: Synthetic oligonucleotide
cuuccaccugucccgggag

SEQ ID NO: 2868 - RNA, 19 nt, Artificial Sequence
  Description of Artificial Sequence: Synthetic oligonucleotide
cuucccccaguucuccuac

SEQ ID NO: 2869 - RNA, 19 nt, Artificial Sequence
  Description of Artificial Sequence: Synthetic oligonucleotide
gaccccaagcagaggcuug

SEQ ID NO: 2870 - RNA, 19 nt, Artificial Sequence
  Description of Artificial Sequence: Synthetic oligonucleotide
gagauccgcuucccgcgca

SEQ ID NO: 2871 - RNA, 19 nt, Artificial Sequence
  Description of Artificial Sequence: Synthetic oligonucleotide
gagcuguucuuccaccugu

SEQ ID NO: 2872 - RNA, 19 nt, Artificial Sequence
  Description of Artificial Sequence: Synthetic oligonucleotide
gaggugcuggaggacaaug

SEQ ID NO: 2873 - RNA, 19 nt, Artificial Sequence
  Description of Artificial Sequence: Synthetic oligonucleotide
gauccgcuucccgcgcacg

SEQ ID NO: 2874 - RNA, 19 nt, Artificial Sequence
  Description of Artificial Sequence: Synthetic oligonucleotide
gcccuucuacaaccaggac

SEQ ID NO: 2875 - RNA, 19 nt, Artificial Sequence
  Description of Artificial Sequence: Synthetic oligonucleotide
gccgcuacuacgccaugaa

SEQ ID NO: 2876 - RNA, 19 nt, Artificial Sequence
  Description of Artificial Sequence: Synthetic oligonucleotide
gccugcccuucuacaacca

SEQ ID NO: 2877 - RNA, 19 nt, Artificial Sequence
  Description of Artificial Sequence: Synthetic oligonucleotide
gcuacuacgccaugaagau

SEQ ID NO: 2878 - RNA, 19 nt, Artificial Sequence
  Description of Artificial Sequence: Synthetic oligonucleotide
gcugccugcaguggaccac

SEQ ID NO: 2879 - RNA, 19 nt, Artificial Sequence
  Description of Artificial Sequence: Synthetic oligonucleotide
gcuguucuuccaccugucc

SEQ ID NO: 2880 - RNA, 19 nt, Artificial Sequence
  Description of Artificial Sequence: Synthetic oligonucleotide
ggccgcuacuacgccauga

SEQ ID NO: 2881 - RNA, 19 nt, Artificial Sequence
  Description of Artificial Sequence: Synthetic oligonucleotide
gucauguacgagaugaugu

SEQ ID NO: 2882 - RNA, 19 nt, Artificial Sequence
  Description of Artificial Sequence: Synthetic oligonucleotide
gugcuggaggacaaugacu

SEQ ID NO: 2883 - RNA, 19 nt, Artificial Sequence
  Description of Artificial Sequence: Synthetic oligonucleotide
guggacuggugggggcugg

SEQ ID NO: 2884 - RNA, 19 nt, Artificial Sequence
  Description of Artificial Sequence: Synthetic oligonucleotide
guggucauguacgagauga

SEQ ID NO: 2885 - RNA, 19 nt, Artificial Sequence
  Description of Artificial Sequence: Synthetic oligonucleotide
uacuacgccaugaagaucc

SEQ ID NO: 2886 - RNA, 19 nt, Artificial Sequence
  Description of Artificial Sequence: Synthetic oligonucleotide
uccaccugucccgggagcg

SEQ ID NO: 2887 - RNA, 19 nt, Artificial Sequence
  Description of Artificial Sequence: Synthetic oligonucleotide
uccagacccacgaccgccu

SEQ ID NO: 2888 - RNA, 19 nt, Artificial Sequence
  Description of Artificial Sequence: Synthetic oligonucleotide
ucccccaguucuccuacuc

SEQ ID NO: 2889 - RNA, 19 nt, Artificial Sequence
  Description of Artificial Sequence: Synthetic oligonucleotide
uccgcuucccgcgcacgcu

SEQ ID NO: 2890 - RNA, 19 nt, Artificial Sequence
  Description of Artificial Sequence: Synthetic oligonucleotide
ugcccuucuacaaccagga

SEQ ID NO: 2891 - RNA, 19 nt, Artificial Sequence
  Description of Artificial Sequence: Synthetic oligonucleotide
uggacuggugggggcuggg

SEQ ID NO: 2892 - RNA, 19 nt, Artificial Sequence
  Description of Artificial Sequence: Synthetic oligonucleotide
uggucauguacgagaugau

SEQ ID NO: 2893 - RNA, 19 nt, Artificial Sequence
  Description of Artificial Sequence: Synthetic oligonucleotide
uguacgagaugaugugcgg

SEQ ID NO: 2894 - RNA, 19 nt, Artificial Sequence
  Description of Artificial Sequence: Synthetic oligonucleotide
uguucuuccaccugucccg

SEQ ID NO: 2895 - RNA, 19 nt, Artificial Sequence
  Description of Artificial Sequence: Synthetic oligonucleotide
uuccaccugucccgggagc

SEQ ID NO: 2896 - RNA, 19 nt, Artificial Sequence
  Description of Artificial Sequence: Synthetic oligonucleotide
uuccagacccacgaccgcc

SEQ ID NO: 2897 - RNA, 19 nt, Artificial Sequence
  Description of Artificial Sequence: Synthetic oligonucleotide
uucccccaguucuccuacu

SEQ ID NO: 2898 - RNA, 19 nt, Artificial Sequence
  Description of Artificial Sequence: Synthetic oligonucleotide
uucuuccaccugucccggg

SEQ ID NO: 2899 - RNA, 19 nt, Artificial Sequence
  Description of Artificial Sequence: Synthetic oligonucleotide
uacaaccaggaccaugaga

SEQ ID NO: 2900 - RNA, 19 nt, Artificial Sequence
  Description of Artificial Sequence: Synthetic oligonucleotide
ucuacaaccaggaccauga

SEQ ID NO: 2901 - RNA, 19 nt, Artificial Sequence
  Description of Artificial Sequence: Synthetic oligonucleotide
augcuggacaaagauggcc

SEQ ID NO: 2902 - RNA, 19 nt, Artificial Sequence
  Description of Artificial Sequence: Synthetic oligonucleotide
cuggacaaagauggccaca

SEQ ID NO: 2903 - RNA, 19 nt, Artificial Sequence
  Description of Artificial Sequence: Synthetic oligonucleotide
gcuggacaaagauggccac

SEQ ID NO: 2904 - RNA, 19 nt, Artificial Sequence
  Description of Artificial Sequence: Synthetic oligonucleotide
ugcuggacaaagauggcca

SEQ ID NO: 2905 - RNA, 19 nt, Artificial Sequence
  Description of Artificial Sequence: Synthetic oligonucleotide
uggacaaagauggccacau

SEQ ID NO: 2906 - RNA, 19 nt, Artificial Sequence
  Description of Artificial Sequence: Synthetic oligonucleotide
aacgggggcgagcuguucu

SEQ ID NO: 2907 - RNA, 19 nt, Artificial Sequence
  Description of Artificial Sequence: Synthetic oligonucleotide
aagcagaggcuuggcgggg

SEQ ID NO: 2908 - RNA, 19 nt, Artificial Sequence
  Description of Artificial Sequence: Synthetic oligonucleotide
acgggggcgagcuguucuu

SEQ ID NO: 2909 - RNA, 19 nt, Artificial Sequence
  Description of Artificial Sequence: Synthetic oligonucleotide
acuggugggggcugggcgu

SEQ ID NO: 2910 - RNA, 19 nt, Artificial Sequence
  Description of Artificial Sequence: Synthetic oligonucleotide
agcagaggcuuggcggggg

SEQ ID NO: 2911 - RNA, 19 nt, Artificial Sequence
  Description of Artificial Sequence: Synthetic oligonucleotide
aggacaaugacuacggccg

SEQ ID NO: 2912 - RNA, 19 nt, Artificial Sequence
  Description of Artificial Sequence: Synthetic oligonucleotide
auggaguacgccaacgggg

SEQ ID NO: 2913 - RNA, 19 nt, Artificial Sequence
  Description of Artificial Sequence: Synthetic oligonucleotide
caacgggggcgagcuguuc

SEQ ID NO: 2914 - RNA, 19 nt, Artificial Sequence
  Description of Artificial Sequence: Synthetic oligonucleotide
caagaaggaccccaagcag

SEQ ID NO: 2915 - RNA, 19 nt, Artificial Sequence
  Description of Artificial Sequence: Synthetic oligonucleotide
caagcagaggcuuggcggg

SEQ ID NO: 2916 - RNA, 19 nt, Artificial Sequence
  Description of Artificial Sequence: Synthetic oligonucleotide
ccaagcagaggcuuggcgg

SEQ ID NO: 2917 - RNA, 19 nt, Artificial Sequence
  Description of Artificial Sequence: Synthetic oligonucleotide
cccaagcagaggcuuggcg

SEQ ID NO: 2918 - RNA, 19 nt, Artificial Sequence
  Description of Artificial Sequence: Synthetic oligonucleotide
cccgaggugcuggaggaca

SEQ ID NO: 2919 - RNA, 19 nt, Artificial Sequence
  Description of Artificial Sequence: Synthetic oligonucleotide
ccgaggugcuggaggacaa

SEQ ID NO: 2920 - RNA, 19 nt, Artificial Sequence
  Description of Artificial Sequence: Synthetic oligonucleotide
cgagcuguucuuccaccug

SEQ ID NO: 2921 - RNA, 19 nt, Artificial Sequence
  Description of Artificial Sequence: Synthetic oligonucleotide
cgaggugcuggaggacaau

SEQ ID NO: 2922 - RNA, 19 nt, Artificial Sequence
  Description of Artificial Sequence: Synthetic oligonucleotide
cguggucauguacgagaug

SEQ ID NO: 2923 - RNA, 19 nt, Artificial Sequence
  Description of Artificial Sequence: Synthetic oligonucleotide
cucaagaaggaccccaagc

SEQ ID NO: 2924 - RNA, 19 nt, Artificial Sequence
  Description of Artificial Sequence: Synthetic oligonucleotide
cugcucaagaaggacccca

SEQ ID NO: 2925 - RNA, 19 nt, Artificial Sequence
  Description of Artificial Sequence: Synthetic oligonucleotide
cuggaggacaaugacuacg

SEQ ID NO: 2926 - RNA, 19 nt, Artificial Sequence
  Description of Artificial Sequence: Synthetic oligonucleotide
cugggcguggucauguacg

SEQ ID NO: 2927 - RNA, 19 nt, Artificial Sequence
  Description of Artificial Sequence: Synthetic oligonucleotide
gacuggugggggcugggcg

SEQ ID NO: 2928 - RNA, 19 nt, Artificial Sequence
  Description of Artificial Sequence: Synthetic oligonucleotide
gaggacaaugacuacggcc

SEQ ID NO: 2929 - RNA, 19 nt, Artificial Sequence
  Description of Artificial Sequence: Synthetic oligonucleotide
gccaacgggggcgagcugu

SEQ ID NO: 2930 - RNA, 19 nt, Artificial Sequence
  Description of Artificial Sequence: Synthetic oligonucleotide
gcgagcuguucuuccaccu

SEQ ID NO: 2931 - RNA, 19 nt, Artificial Sequence
  Description of Artificial Sequence: Synthetic oligonucleotide
gcguggucauguacgagau

SEQ ID NO: 2932 - RNA, 19 nt, Artificial Sequence
  Description of Artificial Sequence: Synthetic oligonucleotide
gcucaagaaggaccccaag

SEQ ID NO: 2933 - RNA, 19 nt, Artificial Sequence
  Description of Artificial Sequence: Synthetic oligonucleotide
gcugcucaagaaggacccc

SEQ ID NO: 2934 - RNA, 19 nt, Artificial Sequence
  Description of Artificial Sequence: Synthetic oligonucleotide
gcuggaggacaaugacuac

SEQ ID NO: 2935 - RNA, 19 nt, Artificial Sequence
  Description of Artificial Sequence: Synthetic oligonucleotide
gcugggcguggucauguac

SEQ ID NO: 2936 - RNA, 19 nt, Artificial Sequence
  Description of Artificial Sequence: Synthetic oligonucleotide
ggacuggugggggcugggc

SEQ ID NO: 2937 - RNA, 19 nt, Artificial Sequence
  Description of Artificial Sequence: Synthetic oligonucleotide
ggcgagcuguucuuccacc

SEQ ID NO: 2938 - RNA, 19 nt, Artificial Sequence
  Description of Artificial Sequence: Synthetic oligonucleotide
ggcguggucauguacgaga

SEQ ID NO: 2939 - RNA, 19 nt, Artificial Sequence
  Description of Artificial Sequence: Synthetic oligonucleotide
ggcugcucaagaaggaccc

SEQ ID NO: 2940 - RNA, 19 nt, Artificial Sequence
  Description of Artificial Sequence: Synthetic oligonucleotide
ggcugggcguggucaugua

SEQ ID NO: 2941 - RNA, 19 nt, Artificial Sequence
  Description of Artificial Sequence: Synthetic oligonucleotide
gggcgagcuguucuuccac

SEQ ID NO: 2942 - RNA, 19 nt, Artificial Sequence
  Description of Artificial Sequence: Synthetic oligonucleotide
gggcguggucauguacgag

SEQ ID NO: 2943 - RNA, 19 nt, Artificial Sequence
  Description of Artificial Sequence: Synthetic oligonucleotide
gggcugcucaagaaggacc

SEQ ID NO: 2944 - RNA, 19 nt, Artificial Sequence
  Description of Artificial Sequence: Synthetic oligonucleotide
gggcugggcguggucaugu

SEQ ID NO: 2945 - RNA, 19 nt, Artificial Sequence
  Description of Artificial Sequence: Synthetic oligonucleotide
ggggcgagcuguucuucca

SEQ ID NO: 2946 - RNA, 19 nt, Artificial Sequence
  Description of Artificial Sequence: Synthetic oligonucleotide
gggggcgagcuguucuucc

SEQ ID NO: 2947 - RNA, 19 nt, Artificial Sequence
  Description of Artificial Sequence: Synthetic oligonucleotide
gggggcugggcguggucau

SEQ ID NO: 2948 - RNA, 19 nt, Artificial Sequence
  Description of Artificial Sequence: Synthetic oligonucleotide
gugggggcugggcgugguc

SEQ ID NO: 2949 - RNA, 19 nt, Artificial Sequence
  Description of Artificial Sequence: Synthetic oligonucleotide
ucaagaaggaccccaagca

SEQ ID NO: 2950 - RNA, 19 nt, Artificial Sequence
  Description of Artificial Sequence: Synthetic oligonucleotide
ugcucaagaaggaccccaa

SEQ ID NO: 2951 - RNA, 19 nt, Artificial Sequence
  Description of Artificial Sequence: Synthetic oligonucleotide
uggaggacaaugacuacgg

SEQ ID NO: 2952 - RNA, 19 nt, Artificial Sequence
  Description of Artificial Sequence: Synthetic oligonucleotide
uggaguacgccaacggggg

SEQ ID NO: 2953 - RNA, 19 nt, Artificial Sequence
  Description of Artificial Sequence: Synthetic oligonucleotide
ugggcguggucauguacga

SEQ ID NO: 2954 - RNA, 19 nt, Artificial Sequence
  Description of Artificial Sequence: Synthetic oligonucleotide
ugggggcugggcgugguca

SEQ ID NO: 2955 - RNA, 19 nt, Artificial Sequence
  Description of Artificial Sequence: Synthetic oligonucleotide
uggugggggcugggcgugg

SEQ ID NO: 2956 - RNA, 19 nt, Artificial Sequence
  Description of Artificial Sequence: Synthetic oligonucleotide
cuucuacaaccaggaccau

SEQ ID NO: 2957 - RNA, 19 nt, Artificial Sequence
  Description of Artificial Sequence: Synthetic oligonucleotide
aaccucaugcuggacaaag

SEQ ID NO: 2958 - RNA, 19 nt, Artificial Sequence
  Description of Artificial Sequence: Synthetic oligonucleotide
aagcuggaaaaccucaugc

SEQ ID NO: 2959 - RNA, 19 nt, Artificial Sequence
  Description of Artificial Sequence: Synthetic oligonucleotide
accucaugcuggacaaaga

SEQ ID NO: 2960 - RNA, 19 nt, Artificial Sequence
  Description of Artificial Sequence: Synthetic oligonucleotide
acgagaugaugugcggccg

SEQ ID NO: 2961 - RNA, 19 nt, Artificial Sequence
  Description of Artificial Sequence: Synthetic oligonucleotide
aaaaccucaugcuggacaa

SEQ ID NO: 2962 - RNA, 19 nt, Artificial Sequence
  Description of Artificial Sequence: Synthetic oligonucleotide
agaugaugugcggccgccu

SEQ ID NO: 2963 - RNA, 19 nt, Artificial Sequence
  Description of Artificial Sequence: Synthetic oligonucleotide
agcucauccucauggaaga

SEQ ID NO: 2964 - RNA, 19 nt, Artificial Sequence
  Description of Artificial Sequence: Synthetic oligonucleotide
agcuggaaaaccucaugcu

SEQ ID NO: 2965 - RNA, 19 nt, Artificial Sequence
  Description of Artificial Sequence: Synthetic oligonucleotide
aagagauccgcuucccgcg

SEQ ID NO: 2966 - RNA, 19 nt, Artificial Sequence
  Description of Artificial Sequence: Synthetic oligonucleotide
aaugccagcugaugaagac

SEQ ID NO: 2967 - RNA, 19 nt, Artificial Sequence
  Description of Artificial Sequence: Synthetic oligonucleotide
auccucauggaagagaucc

SEQ ID NO: 2968 - RNA, 19 nt, Artificial Sequence
  Description of Artificial Sequence: Synthetic oligonucleotide
augaugugcggccgccugc

SEQ ID NO: 2969 - RNA, 19 nt, Artificial Sequence
  Description of Artificial Sequence: Synthetic oligonucleotide
auggaagagauccgcuucc

SEQ ID NO: 2970 - RNA, 19 nt, Artificial Sequence
  Description of Artificial Sequence: Synthetic oligonucleotide
augugcggccgccugcccu

SEQ ID NO: 2971 - RNA, 19 nt, Artificial Sequence
  Description of Artificial Sequence: Synthetic oligonucleotide
caagcuggaaaaccucaug

SEQ ID NO: 2972 - RNA, 19 nt, Artificial Sequence
  Description of Artificial Sequence: Synthetic oligonucleotide
cauccucauggaagagauc

SEQ ID NO: 2973 - RNA, 19 nt, Artificial Sequence
  Description of Artificial Sequence: Synthetic oligonucleotide
cccgaggccaagucccugc

SEQ ID NO: 2974 - RNA, 19 nt, Artificial Sequence
  Description of Artificial Sequence: Synthetic oligonucleotide
ccgaggccaagucccugcu

SEQ ID NO: 2975 - RNA, 19 nt, Artificial Sequence
  Description of Artificial Sequence: Synthetic oligonucleotide
ccgcuucccgcgcacgcuc

SEQ ID NO: 2976 - RNA, 19 nt, Artificial Sequence
  Description of Artificial Sequence: Synthetic oligonucleotide
ccucauggaagagauccgc

SEQ ID NO: 2977 - RNA, 19 nt, Artificial Sequence
  Description of Artificial Sequence: Synthetic oligonucleotide
cgagaugaugugcggccgc

SEQ ID NO: 2978 - RNA, 19 nt, Artificial Sequence
  Description of Artificial Sequence: Synthetic oligonucleotide
cuacaaccaggaccacgag

SEQ ID NO: 2979 - RNA, 19 nt, Artificial Sequence
  Description of Artificial Sequence: Synthetic oligonucleotide
cucauccucauggaagaga

SEQ ID NO: 2980 - RNA, 19 nt, Artificial Sequence
  Description of Artificial Sequence: Synthetic oligonucleotide
cucauggaagagauccgcu

SEQ ID NO: 2981 - RNA, 19 nt, Artificial Sequence
  Description of Artificial Sequence: Synthetic oligonucleotide
cuggaaaaccucaugcugg

SEQ ID NO: 2982 - RNA, 19 nt, Artificial Sequence
  Description of Artificial Sequence: Synthetic oligonucleotide
cuucuacaaccaggaccac

SEQ ID NO: 2983 - RNA, 19 nt, Artificial Sequence
  Description of Artificial Sequence: Synthetic oligonucleotide
ccuuccagacccacgaccg

SEQ ID NO: 2984 - RNA, 19 nt, Artificial Sequence
  Description of Artificial Sequence: Synthetic oligonucleotide
gaaaaccucaugcuggaca

SEQ ID NO: 2985 - RNA, 19 nt, Artificial Sequence
  Description of Artificial Sequence: Synthetic oligonucleotide
gagaugaugugcggccgcc

SEQ ID NO: 2986 - RNA, 19 nt, Artificial Sequence
  Description of Artificial Sequence: Synthetic oligonucleotide
gagcucauccucauggaag

SEQ ID NO: 2987 - RNA, 19 nt, Artificial Sequence
  Description of Artificial Sequence: Synthetic oligonucleotide
gaagagauccgcuucccgc

SEQ ID NO: 2988 - RNA, 19 nt, Artificial Sequence
  Description of Artificial Sequence: Synthetic oligonucleotide
gaugaugugcggccgccug

SEQ ID NO: 2989 - RNA, 19 nt, Artificial Sequence
  Description of Artificial Sequence: Synthetic oligonucleotide
gaugugcggccgccugccc

SEQ ID NO: 2990 - RNA, 19 nt, Artificial Sequence
  Description of Artificial Sequence: Synthetic oligonucleotide
gcggccgccugcccuucua

SEQ ID NO: 2991 - RNA, 19 nt, Artificial Sequence
  Description of Artificial Sequence: Synthetic oligonucleotide
gcucauccucauggaagag

SEQ ID NO: 2992 - RNA, 19 nt, Artificial Sequence
  Description of Artificial Sequence: Synthetic oligonucleotide
gcuggaaaaccucaugcug

SEQ ID NO: 2993 - RNA, 19 nt, Artificial Sequence
  Description of Artificial Sequence: Synthetic oligonucleotide
ggaaaaccucaugcuggac

SEQ ID NO: 2994 - RNA, 19 nt, Artificial Sequence
  Description of Artificial Sequence: Synthetic oligonucleotide
agagauccgcuucccgcgc

SEQ ID NO: 2995 - RNA, 19 nt, Artificial Sequence
  Description of Artificial Sequence: Synthetic oligonucleotide
ggaagagauccgcuucccg

SEQ ID NO: 2996 - RNA, 19 nt, Artificial Sequence
  Description of Artificial Sequence: Synthetic oligonucleotide
ggccgccugcccuucuaca

SEQ ID NO: 2997 - RNA, 19 nt, Artificial Sequence
  Description of Artificial Sequence: Synthetic oligonucleotide
guacgagaugaugugcggc

SEQ ID NO: 2998 - RNA, 19 nt, Artificial Sequence
  Description of Artificial Sequence: Synthetic oligonucleotide
gccgccugcccuucuacaa

SEQ ID NO: 2999 - RNA, 19 nt, Artificial Sequence
  Description of Artificial Sequence: Synthetic oligonucleotide
gugcggccgccugcccuuc

SEQ ID NO: 3000 - RNA, 19 nt, Artificial Sequence
  Description of Artificial Sequence: Synthetic oligonucleotide
uacgagaugaugugcggcc

SEQ ID NO: 3001 - RNA, 19 nt, Artificial Sequence
  Description of Artificial Sequence: Synthetic oligonucleotide
ucaagcuggaaaaccucau

SEQ ID NO: 3002 - RNA, 19 nt, Artificial Sequence
  Description of Artificial Sequence: Synthetic oligonucleotide
ucauccucauggaagagau

SEQ ID NO: 3003 - RNA, 19 nt, Artificial Sequence
  Description of Artificial Sequence: Synthetic oligonucleotide
ucauggaagagauccgcuu

SEQ ID NO: 3004 - RNA, 19 nt, Artificial Sequence
  Description of Artificial Sequence: Synthetic oligonucleotide
uccucauggaagagauccg

SEQ ID NO: 3005 - RNA, 19 nt, Artificial Sequence
  Description of Artificial Sequence: Synthetic oligonucleotide
ccgccugcccuucuacaac

SEQ ID NO: 3006 - RNA, 19 nt, Artificial Sequence
  Description of Artificial Sequence: Synthetic oligonucleotide
ucuacaaccaggaccacga

SEQ ID NO: 3007 - RNA, 19 nt, Artificial Sequence
  Description of Artificial Sequence: Synthetic oligonucleotide
ugaugugcggccgccugcc

SEQ ID NO: 3008 - RNA, 19 nt, Artificial Sequence
  Description of Artificial Sequence: Synthetic oligonucleotide
ugcggccgccugcccuucu

SEQ ID NO: 3009 - RNA, 19 nt, Artificial Sequence
  Description of Artificial Sequence: Synthetic oligonucleotide
uggaaaaccucaugcugga

SEQ ID NO: 3010 - RNA, 19 nt, Artificial Sequence
  Description of Artificial Sequence: Synthetic oligonucleotide
uggaagagauccgcuuccc

SEQ ID NO: 3011 - RNA, 19 nt, Artificial Sequence
  Description of Artificial Sequence: Synthetic oligonucleotide
ugugcggccgccugcccuu

SEQ ID NO: 3012 - RNA, 19 nt, Artificial Sequence
  Description of Artificial Sequence: Synthetic oligonucleotide
uucuacaaccaggaccacg

SEQ ID NO: 3013 - RNA, 19 nt, Artificial Sequence
  Description of Artificial Sequence: Synthetic oligonucleotide
uucuccuacucggccagca

SEQ ID NO: 3014 - RNA, 19 nt, Artificial Sequence
  Description of Artificial Sequence: Synthetic oligonucleotide
ucgagcucauccucaugga

SEQ ID NO: 3015 - RNA, 19 nt, Artificial Sequence
  Description of Artificial Sequence: Synthetic oligonucleotide
cuuccagacccacgaccgc

SEQ ID NO: 3016 - RNA, 19 nt, Artificial Sequence
  Description of Artificial Sequence: Synthetic oligonucleotide
uucgagcucauccucaugg

SEQ ID NO: 3017 - RNA, 19 nt, Artificial Sequence
  Description of Artificial Sequence: Synthetic oligonucleotide
aaccaggaccaugagaaac

SEQ ID NO: 3018 - RNA, 19 nt, Artificial Sequence
  Description of Artificial Sequence: Synthetic oligonucleotide
accaggaccaugagaaacu

SEQ ID NO: 3019 - RNA, 19 nt, Artificial Sequence
  Description of Artificial Sequence: Synthetic oligonucleotide
accaugagaaacuuuuuga

SEQ ID NO: 3020 - RNA, 19 nt, Artificial Sequence
  Description of Artificial Sequence: Synthetic oligonucleotide
aggaccaugagaaacuuuu

SEQ ID NO: 3021 - RNA, 19 nt, Artificial Sequence
  Description of Artificial Sequence: Synthetic oligonucleotide
caaccaggaccaugagaaa

SEQ ID NO: 3022 - RNA, 19 nt, Artificial Sequence
  Description of Artificial Sequence: Synthetic oligonucleotide
caggaccaugagaaacuuu

SEQ ID NO: 3023 - RNA, 19 nt, Artificial Sequence
  Description of Artificial Sequence: Synthetic oligonucleotide
ccaggaccaugagaaacuu

SEQ ID NO: 3024 - RNA, 19 nt, Artificial Sequence
  Description of Artificial Sequence: Synthetic oligonucleotide
gaccaugagaaacuuuuug

SEQ ID NO: 3025 - RNA, 19 nt, Artificial Sequence
  Description of Artificial Sequence: Synthetic oligonucleotide
ggaccaugagaaacuuuuu

SEQ ID NO: 3026 - RNA, 19 nt, Artificial Sequence
  Description of Artificial Sequence: Synthetic oligonucleotide
auggugcagaaauugucuc

SEQ ID NO: 3027 - RNA, 19 nt, Artificial Sequence
  Description of Artificial Sequence: Synthetic oligonucleotide
uauggugcagaaauugucu

SEQ ID NO: 3028 - RNA, 19 nt, Artificial Sequence
  Description of Artificial Sequence: Synthetic oligonucleotide
aaccucaugcuggacaagg

SEQ ID NO: 3029 - RNA, 19 nt, Artificial Sequence
  Description of Artificial Sequence: Synthetic oligonucleotide
aagcuggagaaccucaugc

SEQ ID NO: 3030 - RNA, 19 nt, Artificial Sequence
  Description of Artificial Sequence: Synthetic oligonucleotide
aaggccacaggccgcuacu

SEQ ID NO: 3031 - RNA, 19 nt, Artificial Sequence
  Description of Artificial Sequence: Synthetic oligonucleotide
acaggccgcuacuacgcca

SEQ ID NO: 3032 - RNA, 19 nt, Artificial Sequence
  Description of Artificial Sequence: Synthetic oligonucleotide
acaucaagaccuggcggcc

SEQ ID NO: 3033 - RNA, 19 nt, Artificial Sequence
  Description of Artificial Sequence: Synthetic oligonucleotide
acccacgaccgccucugcu

SEQ ID NO: 3034 - RNA, 19 nt, Artificial Sequence
  Description of Artificial Sequence: Synthetic oligonucleotide
accucaugcuggacaagga

SEQ ID NO: 3035 - RNA, 19 nt, Artificial Sequence
  Description of Artificial Sequence: Synthetic oligonucleotide
acgaccgccucugcuuugu

SEQ ID NO: 3036 - RNA, 19 nt, Artificial Sequence
  Description of Artificial Sequence: Synthetic oligonucleotide
acgagaugaugugcggucg

SEQ ID NO: 3037 - RNA, 19 nt, Artificial Sequence
  Description of Artificial Sequence: Synthetic oligonucleotide
agaaggccacaggccgcua

SEQ ID NO: 3038 - RNA, 19 nt, Artificial Sequence
  Description of Artificial Sequence: Synthetic oligonucleotide
agaugaugugcggucgccu

SEQ ID NO: 3039 - RNA, 19 nt, Artificial Sequence
  Description of Artificial Sequence: Synthetic oligonucleotide
agcucauccucauggagga

SEQ ID NO: 3040 - RNA, 19 nt, Artificial Sequence
  Description of Artificial Sequence: Synthetic oligonucleotide
agcuggagaaccucaugcu

SEQ ID NO: 3041 - RNA, 19 nt, Artificial Sequence
  Description of Artificial Sequence: Synthetic oligonucleotide
aggagauccgcuucccgcg

SEQ ID NO: 3042 - RNA, 19 nt, Artificial Sequence
  Description of Artificial Sequence: Synthetic oligonucleotide
aggccgcuacuacgccaug

SEQ ID NO: 3043 - RNA, 19 nt, Artificial Sequence
  Description of Artificial Sequence: Synthetic oligonucleotide
agugccagcugaugaagac

SEQ ID NO: 3044 - RNA, 19 nt, Artificial Sequence
  Description of Artificial Sequence: Synthetic oligonucleotide
aguggaccacugucaucga

SEQ ID NO: 3045 - RNA, 19 nt, Artificial Sequence
  Description of Artificial Sequence: Synthetic oligonucleotide
aguggacuggugggggcug

SEQ ID NO: 3046 - RNA, 19 nt, Artificial Sequence
  Description of Artificial Sequence: Synthetic oligonucleotide
aucaagaccuggcggccac

SEQ ID NO: 3047 - RNA, 19 nt, Artificial Sequence
  Description of Artificial Sequence: Synthetic oligonucleotide
auccgcugccugcagugga

SEQ ID NO: 3048 - RNA, 19 nt, Artificial Sequence
  Description of Artificial Sequence: Synthetic oligonucleotide
auccucauggaggagaucc

SEQ ID NO: 3049 - RNA, 19 nt, Artificial Sequence
  Description of Artificial Sequence: Synthetic oligonucleotide
augaugugcggucgccugc

SEQ ID NO: 3050 - RNA, 19 nt, Artificial Sequence
  Description of Artificial Sequence: Synthetic oligonucleotide
auggaggagauccgcuucc

SEQ ID NO: 3051 - RNA, 19 nt, Artificial Sequence
  Description of Artificial Sequence: Synthetic oligonucleotide
augugcggucgccugcccu

SEQ ID NO: 3052 - RNA, 19 nt, Artificial Sequence
  Description of Artificial Sequence: Synthetic oligonucleotide
caagcuggagaaccucaug

SEQ ID NO: 3053 - RNA, 19 nt, Artificial Sequence
  Description of Artificial Sequence: Synthetic oligonucleotide
cacgaccgccucugcuuug

SEQ ID NO: 3054 - RNA, 19 nt, Artificial Sequence
  Description of Artificial Sequence: Synthetic oligonucleotide
cagacccacgaccgccucu

SEQ ID NO: 3055 - RNA, 19 nt, Artificial Sequence
  Description of Artificial Sequence: Synthetic oligonucleotide
caggccgcuacuacgccau

SEQ ID NO: 3056 - RNA, 19 nt, Artificial Sequence
  Description of Artificial Sequence: Synthetic oligonucleotide
caguggaccacugucaucg

SEQ ID NO: 3057 - RNA, 19 nt, Artificial Sequence
  Description of Artificial Sequence: Synthetic oligonucleotide
caguggacuggugggggcu

SEQ ID NO: 3058 - RNA, 19 nt, Artificial Sequence
  Description of Artificial Sequence: Synthetic oligonucleotide
caucaagaccuggcggcca

SEQ ID NO: 3059 - RNA, 19 nt, Artificial Sequence
  Description of Artificial Sequence: Synthetic oligonucleotide
cauccgcugccugcagugg

SEQ ID NO: 3060 - RNA, 19 nt, Artificial Sequence
  Description of Artificial Sequence: Synthetic oligonucleotide
cauccucauggaggagauc

SEQ ID NO: 3061 - RNA, 19 nt, Artificial Sequence
  Description of Artificial Sequence: Synthetic oligonucleotide
cauggaggagauccgcuuc

SEQ ID NO: 3062 - RNA, 19 nt, Artificial Sequence
  Description of Artificial Sequence: Synthetic oligonucleotide
ccacaggccgcuacuacgc

SEQ ID NO: 3063 - RNA, 19 nt, Artificial Sequence
  Description of Artificial Sequence: Synthetic oligonucleotide
ccagcugaugaagacggag

SEQ ID NO: 3064 - RNA, 19 nt, Artificial Sequence
  Description of Artificial Sequence: Synthetic oligonucleotide
ccaggcaccccuuccucac

SEQ ID NO: 3065 - RNA, 19 nt, Artificial Sequence
  Description of Artificial Sequence: Synthetic oligonucleotide
cccacgaccgccucugcuu

SEQ ID NO: 3066 - RNA, 19 nt, Artificial Sequence
  Description of Artificial Sequence: Synthetic oligonucleotide
ccccacuucccccaguucu

SEQ ID NO: 3067 - RNA, 19 nt, Artificial Sequence
  Description of Artificial Sequence: Synthetic oligonucleotide
cccgaggccaaguccuugc

SEQ ID NO: 3068 - RNA, 19 nt, Artificial Sequence
  Description of Artificial Sequence: Synthetic oligonucleotide
ccgcuucccgcgcacgcuu

SEQ ID NO: 3069 - RNA, 19 nt, Artificial Sequence
  Description of Artificial Sequence: Synthetic oligonucleotide
ccugcaguggaccacuguc

SEQ ID NO: 3070 - RNA, 19 nt, Artificial Sequence
  Description of Artificial Sequence: Synthetic oligonucleotide
ccugucccgggagcgugug

SEQ ID NO: 3071 - RNA, 19 nt, Artificial Sequence
  Description of Artificial Sequence: Synthetic oligonucleotide
ccuucauuggcuacaagga

SEQ ID NO: 3072 - RNA, 19 nt, Artificial Sequence
  Description of Artificial Sequence: Synthetic oligonucleotide
cgagaugaugugcggucgc

SEQ ID NO: 3073 - RNA, 19 nt, Artificial Sequence
  Description of Artificial Sequence: Synthetic oligonucleotide
cgaggccaaguccuugcuu

SEQ ID NO: 3074 - RNA, 19 nt, Artificial Sequence
  Description of Artificial Sequence: Synthetic oligonucleotide
cggucgccugcccuucuac

SEQ ID NO: 3075 - RNA, 19 nt, Artificial Sequence
  Description of Artificial Sequence: Synthetic oligonucleotide
cucauccucauggaggaga

SEQ ID NO: 3076 - RNA, 19 nt, Artificial Sequence
  Description of Artificial Sequence: Synthetic oligonucleotide
cucauggaggagauccgcu

SEQ ID NO: 3077 - RNA, 19 nt, Artificial Sequence
  Description of Artificial Sequence: Synthetic oligonucleotide
cugcaguggaccacuguca

SEQ ID NO: 3078 - RNA, 19 nt, Artificial Sequence
  Description of Artificial Sequence: Synthetic oligonucleotide
cugccugcaguggaccacu

SEQ ID NO: 3079 - RNA, 19 nt, Artificial Sequence
  Description of Artificial Sequence: Synthetic oligonucleotide
cuggagaaccucaugcugg

SEQ ID NO: 3080 - RNA, 19 nt, Artificial Sequence
  Description of Artificial Sequence: Synthetic oligonucleotide
cugucccgggagcgugugu

SEQ ID NO: 3081 - RNA, 19 nt, Artificial Sequence
  Description of Artificial Sequence: Synthetic oligonucleotide
cuucauuggcuacaaggag

SEQ ID NO: 3082 - RNA, 19 nt, Artificial Sequence
  Description of Artificial Sequence: Synthetic oligonucleotide
cuuuccagacccacgaccg

SEQ ID NO: 3083 - RNA, 19 nt, Artificial Sequence
  Description of Artificial Sequence: Synthetic oligonucleotide
gacccacgaccgccucugc

SEQ ID NO: 3084 - RNA, 19 nt, Artificial Sequence
  Description of Artificial Sequence: Synthetic oligonucleotide
gagaaccucaugcuggaca

SEQ ID NO: 3085 - RNA, 19 nt, Artificial Sequence
  Description of Artificial Sequence: Synthetic oligonucleotide
gagaaggccacaggccgcu

SEQ ID NO: 3086 - RNA, 19 nt, Artificial Sequence
  Description of Artificial Sequence: Synthetic oligonucleotide
gagaugaugugcggucgcc

SEQ ID NO: 3087 - RNA, 19 nt, Artificial Sequence
  Description of Artificial Sequence: Synthetic oligonucleotide
gagcucauccucauggagg

SEQ ID NO: 3088 - RNA, 19 nt, Artificial Sequence
  Description of Artificial Sequence: Synthetic oligonucleotide
gaggagauccgcuucccgc

SEQ ID NO: 3089 - RNA, 19 nt, Artificial Sequence
  Description of Artificial Sequence: Synthetic oligonucleotide
gaugaugugcggucgccug

SEQ ID NO: 3090 - RNA, 19 nt, Artificial Sequence
  Description of Artificial Sequence: Synthetic oligonucleotide
gaugugcggucgccugccc

SEQ ID NO: 3091 - RNA, 19 nt, Artificial Sequence
  Description of Artificial Sequence: Synthetic oligonucleotide
gcaguggaccacugucauc

SEQ ID NO: 3092 - RNA, 19 nt, Artificial Sequence
  Description of Artificial Sequence: Synthetic oligonucleotide
gcaguggacuggugggggc

SEQ ID NO: 3093 - RNA, 19 nt, Artificial Sequence
  Description of Artificial Sequence: Synthetic oligonucleotide
gccacaggccgcuacuacg

SEQ ID NO: 3094 - RNA, 19 nt, Artificial Sequence
  Description of Artificial Sequence: Synthetic oligonucleotide
gccagcugaugaagacgga

SEQ ID NO: 3095 - RNA, 19 nt, Artificial Sequence
  Description of Artificial Sequence: Synthetic oligonucleotide
gccccacuucccccaguuc

SEQ ID NO: 3096 - RNA, 19 nt, Artificial Sequence
  Description of Artificial Sequence: Synthetic oligonucleotide
gccugcaguggaccacugu

SEQ ID NO: 3097 - RNA, 19 nt, Artificial Sequence
  Description of Artificial Sequence: Synthetic oligonucleotide
gcucauccucauggaggag

SEQ ID NO: 3098 - RNA, 19 nt, Artificial Sequence
  Description of Artificial Sequence: Synthetic oligonucleotide
gcuggagaaccucaugcug

SEQ ID NO: 3099 - RNA, 19 nt, Artificial Sequence
  Description of Artificial Sequence: Synthetic oligonucleotide
ggagaaggccacaggccgc

SEQ ID NO: 3100 - RNA, 19 nt, Artificial Sequence
  Description of Artificial Sequence: Synthetic oligonucleotide
ggagauccgcuucccgcgc

SEQ ID NO: 3101 - RNA, 19 nt, Artificial Sequence
  Description of Artificial Sequence: Synthetic oligonucleotide
ggccacaggccgcuacuac

SEQ ID NO: 3102 - RNA, 19 nt, Artificial Sequence
  Description of Artificial Sequence: Synthetic oligonucleotide
ggccccacuucccccaguu

SEQ ID NO: 3103 - RNA, 19 nt, Artificial Sequence
  Description of Artificial Sequence: Synthetic oligonucleotide
ggucgccugcccuucuaca

SEQ ID NO: 3104 - RNA, 19 nt, Artificial Sequence
  Description of Artificial Sequence: Synthetic oligonucleotide
gucccgggagcguguguuc

SEQ ID NO: 3105 - RNA, 19 nt, Artificial Sequence
  Description of Artificial Sequence: Synthetic oligonucleotide
gucgccugcccuucuacaa

SEQ ID NO: 3106 - RNA, 19 nt, Artificial Sequence
  Description of Artificial Sequence: Synthetic oligonucleotide
uacaucaagaccuggcggc

SEQ ID NO: 3107 - RNA, 19 nt, Artificial Sequence
  Description of Artificial Sequence: Synthetic oligonucleotide
uacgagaugaugugcgguc

SEQ ID NO: 3108 - RNA, 19 nt, Artificial Sequence
  Description of Artificial Sequence: Synthetic oligonucleotide
ucaagaccuggcggccacg

SEQ ID NO: 3109 - RNA, 19 nt, Artificial Sequence
  Description of Artificial Sequence: Synthetic oligonucleotide
ucaagcuggagaaccucau

SEQ ID NO: 3110 - RNA, 19 nt, Artificial Sequence
  Description of Artificial Sequence: Synthetic oligonucleotide
ucauccucauggaggagau

SEQ ID NO: 3111 - RNA, 19 nt, Artificial Sequence
  Description of Artificial Sequence: Synthetic oligonucleotide
uccgcugccugcaguggac

SEQ ID NO: 3112 - RNA, 19 nt, Artificial Sequence
  Description of Artificial Sequence: Synthetic oligonucleotide
uccucauggaggagauccg

SEQ ID NO: 3113 - RNA, 19 nt, Artificial Sequence
  Description of Artificial Sequence: Synthetic oligonucleotide
ugaugugcggucgccugcc

SEQ ID NO: 3114 - RNA, 19 nt, Artificial Sequence
  Description of Artificial Sequence: Synthetic oligonucleotide
ugcaguggaccacugucau

SEQ ID NO: 3115 - RNA, 19 nt, Artificial Sequence
  Description of Artificial Sequence: Synthetic oligonucleotide
ugccagcugaugaagacgg

SEQ ID NO: 3116 - RNA, 19 nt, Artificial Sequence
  Description of Artificial Sequence: Synthetic oligonucleotide
ugccugcaguggaccacug

SEQ ID NO: 3117 - RNA, 19 nt, Artificial Sequence
  Description of Artificial Sequence: Synthetic oligonucleotide
ugcggucgccugcccuucu

SEQ ID NO: 3118 - RNA, 19 nt, Artificial Sequence
  Description of Artificial Sequence: Synthetic oligonucleotide
uggagaaccucaugcugga

SEQ ID NO: 3119 - RNA, 19 nt, Artificial Sequence
  Description of Artificial Sequence: Synthetic oligonucleotide
uggaggagauccgcuuccc

SEQ ID NO: 3120 - RNA, 19 nt, Artificial Sequence
  Description of Artificial Sequence: Synthetic oligonucleotide
ugucccgggagcguguguu

SEQ ID NO: 3121 - RNA, 19 nt, Artificial Sequence
  Description of Artificial Sequence: Synthetic oligonucleotide
ugugcggucgccugcccuu

SEQ ID NO: 3122 - RNA, 19 nt, Artificial Sequence
  Description of Artificial Sequence: Synthetic oligonucleotide
uucuccuacucggccagcg

SEQ ID NO: 3123 - RNA, 19 nt, Artificial Sequence
  Description of Artificial Sequence: Synthetic oligonucleotide
uugagcucauccucaugga

SEQ ID NO: 3124 - RNA, 19 nt, Artificial Sequence
  Description of Artificial Sequence: Synthetic oligonucleotide
uuuccagacccacgaccgc

SEQ ID NO: 3125 - RNA, 19 nt, Artificial Sequence
  Description of Artificial Sequence: Synthetic oligonucleotide
uuugagcucauccucaugg

SEQ ID NO: 3126 - RNA, 19 nt, Artificial Sequence
  Description of Artificial Sequence: Synthetic oligonucleotide
aaccaggaccaugagaagc

SEQ ID NO: 3127 - RNA, 19 nt, Artificial Sequence
  Description of Artificial Sequence: Synthetic oligonucleotide
accaggaccaugagaagcu

SEQ ID NO: 3128 - RNA, 19 nt, Artificial Sequence
  Description of Artificial Sequence: Synthetic oligonucleotide
accaugagaagcuuuuuga

SEQ ID NO: 3129 - RNA, 19 nt, Artificial Sequence
  Description of Artificial Sequence: Synthetic oligonucleotide
aggaccaugagaagcuuuu

SEQ ID NO: 3130 - RNA, 19 nt, Artificial Sequence
  Description of Artificial Sequence: Synthetic oligonucleotide
caaccaggaccaugagaag

SEQ ID NO: 3131 - RNA, 19 nt, Artificial Sequence
  Description of Artificial Sequence: Synthetic oligonucleotide
caggaccaugagaagcuuu

SEQ ID NO: 3132 - RNA, 19 nt, Artificial Sequence
  Description of Artificial Sequence: Synthetic oligonucleotide
gaccaugagaagcuuuuug

SEQ ID NO: 3133 - RNA, 19 nt, Artificial Sequence
  Description of Artificial Sequence: Synthetic oligonucleotide
ggaccaugagaagcuuuuu

SEQ ID NO: 3134 - RNA, 19 nt, Artificial Sequence
  Description of Artificial Sequence: Synthetic oligonucleotide
aacgggggugagcuguucu

SEQ ID NO: 3135 - RNA, 19 nt, Artificial Sequence
  Description of Artificial Sequence: Synthetic oligonucleotide
aagcagaggcuuggugggg

SEQ ID NO: 3136 - RNA, 19 nt, Artificial Sequence
  Description of Artificial Sequence: Synthetic oligonucleotide
aaggccacuggccgcuacu

SEQ ID NO: 3137 - RNA, 19 nt, Artificial Sequence
  Description of Artificial Sequence: Synthetic oligonucleotide
acuggccgcuacuacgcca

SEQ ID NO: 3138 - RNA, 19 nt, Artificial Sequence
  Description of Artificial Sequence: Synthetic oligonucleotide
acaucaagaccuggaggcc

SEQ ID NO: 3139 - RNA, 19 nt, Artificial Sequence
  Description of Artificial Sequence: Synthetic oligonucleotide
acccacgaccgccugugcu

SEQ ID NO: 3140 - RNA, 19 nt, Artificial Sequence
  Description of Artificial Sequence: Synthetic oligonucleotide
acgaccgccugugcuuugu

SEQ ID NO: 3141 - RNA, 19 nt, Artificial Sequence
  Description of Artificial Sequence: Synthetic oligonucleotide
acgggggugagcuguucuu

SEQ ID NO: 3142 - RNA, 19 nt, Artificial Sequence
  Description of Artificial Sequence: Synthetic oligonucleotide
acuggugggggcugggugu

SEQ ID NO: 3143 - RNA, 19 nt, Artificial Sequence
  Description of Artificial Sequence: Synthetic oligonucleotide
agaaggccacuggccgcua

SEQ ID NO: 3144 - RNA, 19 nt, Artificial Sequence
  Description of Artificial Sequence: Synthetic oligonucleotide
agacccacgaccgccugug

SEQ ID NO: 3145 - RNA, 19 nt, Artificial Sequence
  Description of Artificial Sequence: Synthetic oligonucleotide
agcagaggcuugguggggg

SEQ ID NO: 3146 - RNA, 19 nt, Artificial Sequence
  Description of Artificial Sequence: Synthetic oligonucleotide
aggacaaugacuauggccg

SEQ ID NO: 3147 - RNA, 19 nt, Artificial Sequence
  Description of Artificial Sequence: Synthetic oligonucleotide
aggccacuggccgcuacua

SEQ ID NO: 3148 - RNA, 19 nt, Artificial Sequence
  Description of Artificial Sequence: Synthetic oligonucleotide
uggccgcuacuacgccaug

SEQ ID NO: 3149 - RNA, 19 nt, Artificial Sequence
  Description of Artificial Sequence: Synthetic oligonucleotide
aguggaccacagucaucga

SEQ ID NO: 3150 - RNA, 19 nt, Artificial Sequence
  Description of Artificial Sequence: Synthetic oligonucleotide
cguggacuggugggggcug

SEQ ID NO: 3151 - RNA, 19 nt, Artificial Sequence
  Description of Artificial Sequence: Synthetic oligonucleotide
aucaagaccuggaggccac

SEQ ID NO: 3152 - RNA, 19 nt, Artificial Sequence
  Description of Artificial Sequence: Synthetic oligonucleotide
auacgcugccugcagugga

SEQ ID NO: 3153 - RNA, 19 nt, Artificial Sequence
  Description of Artificial Sequence: Synthetic oligonucleotide
auggaguaugccaacgggg

SEQ ID NO: 3154 - RNA, 19 nt, Artificial Sequence
  Description of Artificial Sequence: Synthetic oligonucleotide
caacgggggugagcuguuc

SEQ ID NO: 3155 - RNA, 19 nt, Artificial Sequence
  Description of Artificial Sequence: Synthetic oligonucleotide
uaagaaggaccccaagcag

SEQ ID NO: 3156 - RNA, 19 nt, Artificial Sequence
  Description of Artificial Sequence: Synthetic oligonucleotide
caagcagaggcuugguggg

SEQ ID NO: 3157 - RNA, 19 nt, Artificial Sequence
  Description of Artificial Sequence: Synthetic oligonucleotide
cacuggccgcuacuacgcc

SEQ ID NO: 3158 - RNA, 19 nt, Artificial Sequence
  Description of Artificial Sequence: Synthetic oligonucleotide
cacgaccgccugugcuuug

SEQ ID NO: 3159 - RNA, 19 nt, Artificial Sequence
  Description of Artificial Sequence: Synthetic oligonucleotide
cagacccacgaccgccugu

SEQ ID NO: 3160 - RNA, 19 nt, Artificial Sequence
  Description of Artificial Sequence: Synthetic oligonucleotide
cuggccgcuacuacgccau

SEQ ID NO: 3161 - RNA, 19 nt, Artificial Sequence
  Description of Artificial Sequence: Synthetic oligonucleotide
caguggaccacagucaucg

SEQ ID NO: 3162 - RNA, 19 nt, Artificial Sequence
  Description of Artificial Sequence: Synthetic oligonucleotide
ccguggacuggugggggcu

SEQ ID NO: 3163 - RNA, 19 nt, Artificial Sequence
  Description of Artificial Sequence: Synthetic oligonucleotide
caucaagaccuggaggcca

SEQ ID NO: 3164 - RNA, 19 nt, Artificial Sequence
  Description of Artificial Sequence: Synthetic oligonucleotide
cauacgcugccugcagugg

SEQ ID NO: 3165 - RNA, 19 nt, Artificial Sequence
  Description of Artificial Sequence: Synthetic oligonucleotide
ccaacgggggugagcuguu

SEQ ID NO: 3166 - RNA, 19 nt, Artificial Sequence
  Description of Artificial Sequence: Synthetic oligonucleotide
ccaagcagaggcuuggugg

SEQ ID NO: 3167 - RNA, 19 nt, Artificial Sequence
  Description of Artificial Sequence: Synthetic oligonucleotide
ccacuggccgcuacuacgc

SEQ ID NO: 3168 - RNA, 19 nt, Artificial Sequence
  Description of Artificial Sequence: Synthetic oligonucleotide
ccacgaccgccugugcuuu

SEQ ID NO: 3169 - RNA, 19 nt, Artificial Sequence
  Description of Artificial Sequence: Synthetic oligonucleotide
ccagcugaugaagaccgag

SEQ ID NO: 3170 - RNA, 19 nt, Artificial Sequence
  Description of Artificial Sequence: Synthetic oligonucleotide
ccaggcacccguuccucac

SEQ ID NO: 3171 - RNA, 19 nt, Artificial Sequence
  Description of Artificial Sequence: Synthetic oligonucleotide
cccaagcagaggcuuggug

SEQ ID NO: 3172 - RNA, 19 nt, Artificial Sequence
  Description of Artificial Sequence: Synthetic oligonucleotide
cccacgaccgccugugcuu

SEQ ID NO: 3173 - RNA, 19 nt, Artificial Sequence
  Description of Artificial Sequence: Synthetic oligonucleotide
ccccaagcagaggcuuggu

SEQ ID NO: 3174 - RNA, 19 nt, Artificial Sequence
  Description of Artificial Sequence: Synthetic oligonucleotide
acccacuucccccaguucu

SEQ ID NO: 3175 - RNA, 19 nt, Artificial Sequence
  Description of Artificial Sequence: Synthetic oligonucleotide
ccugaggugcuggaggaca

SEQ ID NO: 3176 - RNA, 19 nt, Artificial Sequence
  Description of Artificial Sequence: Synthetic oligonucleotide
cugaggugcuggaggacaa

SEQ ID NO: 3177 - RNA, 19 nt, Artificial Sequence
  Description of Artificial Sequence: Synthetic oligonucleotide
ccugcaguggaccacaguc

SEQ ID NO: 3178 - RNA, 19 nt, Artificial Sequence
  Description of Artificial Sequence: Synthetic oligonucleotide
ccugucccgggagcguguc

SEQ ID NO: 3179 - RNA, 19 nt, Artificial Sequence
  Description of Artificial Sequence: Synthetic oligonucleotide
ccuucauuggguacaagga

SEQ ID NO: 3180 - RNA, 19 nt, Artificial Sequence
  Description of Artificial Sequence: Synthetic oligonucleotide
ugagcuguucuuccaccug

SEQ ID NO: 3181 - RNA, 19 nt, Artificial Sequence
  Description of Artificial Sequence: Synthetic oligonucleotide
ugaggugcuggaggacaau

SEQ ID NO: 3182 - RNA, 19 nt, Artificial Sequence
  Description of Artificial Sequence: Synthetic oligonucleotide
cgggggugagcuguucuuc

SEQ ID NO: 3183 - RNA, 19 nt, Artificial Sequence
  Description of Artificial Sequence: Synthetic oligonucleotide
uguggucauguacgagaug

SEQ ID NO: 3184 - RNA, 19 nt, Artificial Sequence
  Description of Artificial Sequence: Synthetic oligonucleotide
cuuaagaaggaccccaagc

SEQ ID NO: 3185 - RNA, 19 nt, Artificial Sequence
  Description of Artificial Sequence: Synthetic oligonucleotide
cugcaguggaccacaguca

SEQ ID NO: 3186 - RNA, 19 nt, Artificial Sequence
  Description of Artificial Sequence: Synthetic oligonucleotide
cugccugcaguggaccaca

SEQ ID NO: 3187 - RNA, 19 nt, Artificial Sequence
  Description of Artificial Sequence: Synthetic oligonucleotide
cugcuuaagaaggacccca

SEQ ID NO: 3188 - RNA, 19 nt, Artificial Sequence
  Description of Artificial Sequence: Synthetic oligonucleotide
cuggaggacaaugacuaug

SEQ ID NO: 3189 - RNA, 19 nt, Artificial Sequence
  Description of Artificial Sequence: Synthetic oligonucleotide
cuggguguggucauguacg

SEQ ID NO: 3190 - RNA, 19 nt, Artificial Sequence
  Description of Artificial Sequence: Synthetic oligonucleotide
cuggugggggcugggugug

SEQ ID NO: 3191 - RNA, 19 nt, Artificial Sequence
  Description of Artificial Sequence: Synthetic oligonucleotide
cugucccgggagcgugucu

SEQ ID NO: 3192 - RNA, 19 nt, Artificial Sequence
  Description of Artificial Sequence: Synthetic oligonucleotide
cuucauuggguacaaggag

SEQ ID NO: 3193 - RNA, 19 nt, Artificial Sequence
  Description of Artificial Sequence: Synthetic oligonucleotide
gacccacgaccgccugugc

SEQ ID NO: 3194 - RNA, 19 nt, Artificial Sequence
  Description of Artificial Sequence: Synthetic oligonucleotide
gacuggugggggcugggug

SEQ ID NO: 3195 - RNA, 19 nt, Artificial Sequence
  Description of Artificial Sequence: Synthetic oligonucleotide
gagaaggccacuggccgcu

SEQ ID NO: 3196 - RNA, 19 nt, Artificial Sequence
  Description of Artificial Sequence: Synthetic oligonucleotide
gaggacaaugacuauggcc

SEQ ID NO: 3197 - RNA, 19 nt, Artificial Sequence
  Description of Artificial Sequence: Synthetic oligonucleotide
gcaguggaccacagucauc

SEQ ID NO: 3198 - RNA, 19 nt, Artificial Sequence
  Description of Artificial Sequence: Synthetic oligonucleotide
gccguggacuggugggggc

SEQ ID NO: 3199 - RNA, 19 nt, Artificial Sequence
  Description of Artificial Sequence: Synthetic oligonucleotide
gccaacgggggugagcugu

SEQ ID NO: 3200 - RNA, 19 nt, Artificial Sequence
  Description of Artificial Sequence: Synthetic oligonucleotide
gccacuggccgcuacuacg

SEQ ID NO: 3201 - RNA, 19 nt, Artificial Sequence
  Description of Artificial Sequence: Synthetic oligonucleotide
gccagcugaugaagaccga

SEQ ID NO: 3202 - RNA, 19 nt, Artificial Sequence
  Description of Artificial Sequence: Synthetic oligonucleotide
gacccacuucccccaguuc

SEQ ID NO: 3203 - RNA, 19 nt, Artificial Sequence
  Description of Artificial Sequence: Synthetic oligonucleotide
gccugcaguggaccacagu

SEQ ID NO: 3204 - RNA, 19 nt, Artificial Sequence
  Description of Artificial Sequence: Synthetic oligonucleotide
gugagcuguucuuccaccu

SEQ ID NO: 3205 - RNA, 19 nt, Artificial Sequence
  Description of Artificial Sequence: Synthetic oligonucleotide
guguggucauguacgagau

SEQ ID NO: 3206 - RNA, 19 nt, Artificial Sequence
  Description of Artificial Sequence: Synthetic oligonucleotide
gcuuaagaaggaccccaag

SEQ ID NO: 3207 - RNA, 19 nt, Artificial Sequence
  Description of Artificial Sequence: Synthetic oligonucleotide
gcugcuuaagaaggacccc

SEQ ID NO: 3208 - RNA, 19 nt, Artificial Sequence
  Description of Artificial Sequence: Synthetic oligonucleotide
gcuggguguggucauguac

SEQ ID NO: 3209 - RNA, 19 nt, Artificial Sequence
  Description of Artificial Sequence: Synthetic oligonucleotide
ggacuggugggggcugggu

SEQ ID NO: 3210 - RNA, 19 nt, Artificial Sequence
  Description of Artificial Sequence: Synthetic oligonucleotide
ggagaaggccacuggccgc

SEQ ID NO: 3211 - RNA, 19 nt, Artificial Sequence
  Description of Artificial Sequence: Synthetic oligonucleotide
ggaggacaaugacuauggc

SEQ ID NO: 3212 - RNA, 19 nt, Artificial Sequence
  Description of Artificial Sequence: Synthetic oligonucleotide
ggccacuggccgcuacuac

SEQ ID NO: 3213 - RNA, 19 nt, Artificial Sequence
  Description of Artificial Sequence: Synthetic oligonucleotide
ggacccacuucccccaguu

SEQ ID NO: 3214 - RNA, 19 nt, Artificial Sequence
  Description of Artificial Sequence: Synthetic oligonucleotide
ggugagcuguucuuccacc

SEQ ID NO: 3215 - RNA, 19 nt, Artificial Sequence
  Description of Artificial Sequence: Synthetic oligonucleotide
gguguggucauguacgaga

SEQ ID NO: 3216 - RNA, 19 nt, Artificial Sequence
  Description of Artificial Sequence: Synthetic oligonucleotide
ggcugcuuaagaaggaccc

SEQ ID NO: 3217 - RNA, 19 nt, Artificial Sequence
  Description of Artificial Sequence: Synthetic oligonucleotide
ggcuggguguggucaugua

SEQ ID NO: 3218 - RNA, 19 nt, Artificial Sequence
  Description of Artificial Sequence: Synthetic oligonucleotide
gggugagcuguucuuccac

SEQ ID NO: 3219 - RNA, 19 nt, Artificial Sequence
  Description of Artificial Sequence: Synthetic oligonucleotide
ggguguggucauguacgag

SEQ ID NO: 3220 - RNA, 19 nt, Artificial Sequence
  Description of Artificial Sequence: Synthetic oligonucleotide
gggcugcuuaagaaggacc

SEQ ID NO: 3221 - RNA, 19 nt, Artificial Sequence
  Description of Artificial Sequence: Synthetic oligonucleotide
gggcuggguguggucaugu

SEQ ID NO: 3222 - RNA, 19 nt, Artificial Sequence
  Description of Artificial Sequence: Synthetic oligonucleotide
ggggugagcuguucuucca

SEQ ID NO: 3223 - RNA, 19 nt, Artificial Sequence
  Description of Artificial Sequence: Synthetic oligonucleotide
ggggcuggguguggucaug

SEQ ID NO: 3224 - RNA, 19 nt, Artificial Sequence
  Description of Artificial Sequence: Synthetic oligonucleotide
gggggugagcuguucuucc

SEQ ID NO: 3225 - RNA, 19 nt, Artificial Sequence
  Description of Artificial Sequence: Synthetic oligonucleotide
gggggcuggguguggucau

SEQ ID NO: 3226 - RNA, 19 nt, Artificial Sequence
  Description of Artificial Sequence: Synthetic oligonucleotide
ggugggggcuggguguggu

SEQ ID NO: 3227 - RNA, 19 nt, Artificial Sequence
  Description of Artificial Sequence: Synthetic oligonucleotide
gucccgggagcgugucuuc

SEQ ID NO: 3228 - RNA, 19 nt, Artificial Sequence
  Description of Artificial Sequence: Synthetic oligonucleotide
uacaucaagaccuggaggc

SEQ ID NO: 3229 - RNA, 19 nt, Artificial Sequence
  Description of Artificial Sequence: Synthetic oligonucleotide
uuaagaaggaccccaagca

SEQ ID NO: 3230 - RNA, 19 nt, Artificial Sequence
  Description of Artificial Sequence: Synthetic oligonucleotide
ucaagaccuggaggccacg

SEQ ID NO: 3231 - RNA, 19 nt, Artificial Sequence
  Description of Artificial Sequence: Synthetic oligonucleotide
ucauacgcugccugcagug

SEQ ID NO: 3232 - RNA, 19 nt, Artificial Sequence
  Description of Artificial Sequence: Synthetic oligonucleotide
uacgcugccugcaguggac

SEQ ID NO: 3233 - RNA, 19 nt, Artificial Sequence
  Description of Artificial Sequence: Synthetic oligonucleotide
ugcaguggaccacagucau

SEQ ID NO: 3234 - RNA, 19 nt, Artificial Sequence
  Description of Artificial Sequence: Synthetic oligonucleotide
ugccagcugaugaagaccg

SEQ ID NO: 3235 - RNA, 19 nt, Artificial Sequence
  Description of Artificial Sequence: Synthetic oligonucleotide
ugccugcaguggaccacag

SEQ ID NO: 3236 - RNA, 19 nt, Artificial Sequence
  Description of Artificial Sequence: Synthetic oligonucleotide
ugcuuaagaaggaccccaa

SEQ ID NO: 3237 - RNA, 19 nt, Artificial Sequence
  Description of Artificial Sequence: Synthetic oligonucleotide
uggaggacaaugacuaugg

SEQ ID NO: 3238 - RNA, 19 nt, Artificial Sequence
  Description of Artificial Sequence: Synthetic oligonucleotide
uggaguaugccaacggggg

SEQ ID NO: 3239 - RNA, 19 nt, Artificial Sequence
  Description of Artificial Sequence: Synthetic oligonucleotide
uggguguggucauguacga

SEQ ID NO: 3240 - RNA, 19 nt, Artificial Sequence
  Description of Artificial Sequence: Synthetic oligonucleotide
ugggggcugggugugguca

SEQ ID NO: 3241 - RNA, 19 nt, Artificial Sequence
  Description of Artificial Sequence: Synthetic oligonucleotide
uggugggggcugggugugg

SEQ ID NO: 3242 - RNA, 19 nt, Artificial Sequence
  Description of Artificial Sequence: Synthetic oligonucleotide
ugucccgggagcgugucuu

SEQ ID NO: 3243 - RNA, 19 nt, Artificial Sequence
  Description of Artificial Sequence: Synthetic oligonucleotide
acaaagauggccacaucaa

SEQ ID NO: 3244 - RNA, 19 nt, Artificial Sequence
  Description of Artificial Sequence: Synthetic oligonucleotide
auggugcagagauugucuc

SEQ ID NO: 3245 - RNA, 19 nt, Artificial Sequence
  Description of Artificial Sequence: Synthetic oligonucleotide
caugcuggacaaagauggc

SEQ ID NO: 3246 - RNA, 19 nt, Artificial Sequence
  Description of Artificial Sequence: Synthetic oligonucleotide
cucaugcuggacaaagaug

SEQ ID NO: 3247 - RNA, 19 nt, Artificial Sequence
  Description of Artificial Sequence: Synthetic oligonucleotide
gacaaagauggccacauca

SEQ ID NO: 3248 - RNA, 19 nt, Artificial Sequence
  Description of Artificial Sequence: Synthetic oligonucleotide
ggacaaagauggccacauc

SEQ ID NO: 3249 - RNA, 19 nt, Artificial Sequence
  Description of Artificial Sequence: Synthetic oligonucleotide
uauggugcagagauugucu

SEQ ID NO: 3250 - RNA, 19 nt, Artificial Sequence
  Description of Artificial Sequence: Synthetic oligonucleotide
ucaugcuggacaaagaugg

SEQ ID NO: 3251 - RNA, 19 nt, Artificial Sequence
  Description of Artificial Sequence: Synthetic oligonucleotide
ccuuucuacaaccaggacc

SEQ ID NO: 3252 - RNA, 19 nt, Artificial Sequence
  Description of Artificial Sequence: Synthetic oligonucleotide
cuuucuacaaccaggacca

SEQ ID NO: 3253 - RNA, 19 nt, Artificial Sequence
  Description of Artificial Sequence: Synthetic oligonucleotide
uuucuacaaccaggaccau

SEQ ID NO: 3254 - RNA, 19 nt, Artificial Sequence
  Description of Artificial Sequence: Synthetic oligonucleotide
ggggcgagcuguuuuucca

SEQ ID NO: 3255 - RNA, 19 nt, Artificial Sequence
  Description of Artificial Sequence: Synthetic oligonucleotide
gggggcgagcuguuuuucc

SEQ ID NO: 3256 - RNA, 19 nt, Artificial Sequence
  Description of Artificial Sequence: Synthetic oligonucleotide
acaaagauggccacauaaa

SEQ ID NO: 3257 - RNA, 19 nt, Artificial Sequence
  Description of Artificial Sequence: Synthetic oligonucleotide
aaugcuggacaaagauggc

SEQ ID NO: 3258 - RNA, 19 nt, Artificial Sequence
  Description of Artificial Sequence: Synthetic oligonucleotide
cuaaugcuggacaaagaug

SEQ ID NO: 3259 - RNA, 19 nt, Artificial Sequence
  Description of Artificial Sequence: Synthetic oligonucleotide
ggacaaagauggccacaua

SEQ ID NO: 3260 - RNA, 19 nt, Artificial Sequence
  Description of Artificial Sequence: Synthetic oligonucleotide
uaaugcuggacaaagaugg

SEQ ID NO: 3261 - RNA, 19 nt, Artificial Sequence
  Description of Artificial Sequence: Synthetic oligonucleotide
acgccaacgggggcgagcu

SEQ ID NO: 3262 - RNA, 19 nt, Artificial Sequence
  Description of Artificial Sequence: Synthetic oligonucleotide
aguacgccaacgggggcga

SEQ ID NO: 3263 - RNA, 19 nt, Artificial Sequence
  Description of Artificial Sequence: Synthetic oligonucleotide
gaguacgccaacgggggcg

SEQ ID NO: 3264 - RNA, 19 nt, Artificial Sequence
  Description of Artificial Sequence: Synthetic oligonucleotide
ggaguacgccaacgggggc

SEQ ID NO: 3265 - RNA, 19 nt, Artificial Sequence
  Description of Artificial Sequence: Synthetic oligonucleotide
guacgccaacgggggcgag

SEQ ID NO: 3266 - RNA, 19 nt, Artificial Sequence
  Description of Artificial Sequence: Synthetic oligonucleotide
uacgccaacgggggcgagc

SEQ ID NO: 3267 - RNA, 19 nt, Artificial Sequence
  Description of Artificial Sequence: Synthetic oligonucleotide
ccaccaugaaaaccuucug

SEQ ID NO: 3268 - RNA, 19 nt, Artificial Sequence
  Description of Artificial Sequence: Synthetic oligonucleotide
cgcuucccgcgcacgcuca

SEQ ID NO: 3269 - RNA, 19 nt, Artificial Sequence
  Description of Artificial Sequence: Synthetic oligonucleotide
cucuucgagcucauccuca

SEQ ID NO: 3270 - RNA, 19 nt, Artificial Sequence
  Description of Artificial Sequence: Synthetic oligonucleotide
gccaccaugaaaaccuucu

SEQ ID NO: 3271 - RNA, 19 nt, Artificial Sequence
  Description of Artificial Sequence: Synthetic oligonucleotide
gcuucccgcgcacgcucag

SEQ ID NO: 3272 - RNA, 19 nt, Artificial Sequence
  Description of Artificial Sequence: Synthetic oligonucleotide
gccccgaggccaagucccu

SEQ ID NO: 3273 - RNA, 19 nt, Artificial Sequence
  Description of Artificial Sequence: Synthetic oligonucleotide
ccccgaggccaagucccug

SEQ ID NO: 3274 - RNA, 19 nt, Artificial Sequence
  Description of Artificial Sequence: Synthetic oligonucleotide
cgagcucauccucauggaa

SEQ ID NO: 3275 - RNA, 19 nt, Artificial Sequence
  Description of Artificial Sequence: Synthetic oligonucleotide
cuucgagcucauccucaug

SEQ ID NO: 3276 - RNA, 19 nt, Artificial Sequence
  Description of Artificial Sequence: Synthetic oligonucleotide
ucuucgagcucauccucau

SEQ ID NO: 3277 - RNA, 19 nt, Artificial Sequence
  Description of Artificial Sequence: Synthetic oligonucleotide
ccaugagaaacuuuuugaa

SEQ ID NO: 3278 - RNA, 19 nt, Artificial Sequence
  Description of Artificial Sequence: Synthetic oligonucleotide
cuauggugcagaaauuguc

SEQ ID NO: 3279 - RNA, 19 nt, Artificial Sequence
  Description of Artificial Sequence: Synthetic oligonucleotide
ucuauggugcagaaauugu

SEQ ID NO: 3280 - RNA, 19 nt, Artificial Sequence
  Description of Artificial Sequence: Synthetic oligonucleotide
acaaugacuacggccgugc

SEQ ID NO: 3281 - RNA, 19 nt, Artificial Sequence
  Description of Artificial Sequence: Synthetic oligonucleotide
accuggcccccgaggugcu

SEQ ID NO: 3282 - RNA, 19 nt, Artificial Sequence
  Description of Artificial Sequence: Synthetic oligonucleotide
aggagaaggccacaggccg

SEQ ID NO: 3283 - RNA, 19 nt, Artificial Sequence
  Description of Artificial Sequence: Synthetic oligonucleotide
aucauccgcugccugcagu

SEQ ID NO: 3284 - RNA, 19 nt, Artificial Sequence
  Description of Artificial Sequence: Synthetic oligonucleotide
auccuggugaaggagaagg

SEQ ID NO: 3285 - RNA, 19 nt, Artificial Sequence
  Description of Artificial Sequence: Synthetic oligonucleotide
caaaaaaaaaaaaaaaaaa

SEQ ID NO: 3286 - RNA, 19 nt, Artificial Sequence
  Description of Artificial Sequence: Synthetic oligonucleotide
cacacacucaccgagaacc

SEQ ID NO: 3287 - RNA, 19 nt, Artificial Sequence
  Description of Artificial Sequence: Synthetic oligonucleotide
cacccuucaagccccaggu

SEQ ID NO: 3288 - RNA, 19 nt, Artificial Sequence
  Description of Artificial Sequence: Synthetic oligonucleotide
cagggcugcucaagaagga

SEQ ID NO: 3289 - RNA, 19 nt, Artificial Sequence
  Description of Artificial Sequence: Synthetic oligonucleotide
cauggaguacgccaacggg

SEQ ID NO: 3290 - RNA, 19 nt, Artificial Sequence
  Description of Artificial Sequence: Synthetic oligonucleotide
ccaaggagaucaugcagca

SEQ ID NO: 3291 - RNA, 19 nt, Artificial Sequence
  Description of Artificial Sequence: Synthetic oligonucleotide
ccacccuucaagccccagg

SEQ ID NO: 3292 - RNA, 19 nt, Artificial Sequence
  Description of Artificial Sequence: Synthetic oligonucleotide
cccccgaggugcuggagga

SEQ ID NO: 3293 - RNA, 19 nt, Artificial Sequence
  Description of Artificial Sequence: Synthetic oligonucleotide
ccccgaggugcuggaggac

SEQ ID NO: 3294 - RNA, 19 nt, Artificial Sequence
  Description of Artificial Sequence: Synthetic oligonucleotide
cccuucaagccccagguca

SEQ ID NO: 3295 - RNA, 19 nt, Artificial Sequence
  Description of Artificial Sequence: Synthetic oligonucleotide
ccuucaagccccaggucac

SEQ ID NO: 3296 - RNA, 19 nt, Artificial Sequence
  Description of Artificial Sequence: Synthetic oligonucleotide
cucaugcuggacaaggacg

SEQ ID NO: 3297 - RNA, 19 nt, Artificial Sequence
  Description of Artificial Sequence: Synthetic oligonucleotide
cuggcccccgaggugcugg

SEQ ID NO: 3298 - RNA, 19 nt, Artificial Sequence
  Description of Artificial Sequence: Synthetic oligonucleotide
cuggugaaggagaaggcca

SEQ ID NO: 3299 - RNA, 19 nt, Artificial Sequence
  Description of Artificial Sequence: Synthetic oligonucleotide
cuucaagccccaggucacg

SEQ ID NO: 3300 - RNA, 19 nt, Artificial Sequence
  Description of Artificial Sequence: Synthetic oligonucleotide
cuuugucauggaguacgcc

SEQ ID NO: 3301 - RNA, 19 nt, Artificial Sequence
  Description of Artificial Sequence: Synthetic oligonucleotide
gacaaugacuacggccgug

SEQ ID NO: 3302 - RNA, 19 nt, Artificial Sequence
  Description of Artificial Sequence: Synthetic oligonucleotide
gaguaccuggcccccgagg

SEQ ID NO: 3303 - RNA, 19 nt, Artificial Sequence
  Description of Artificial Sequence: Synthetic oligonucleotide
gcagaggcuuggcgggggc

SEQ ID NO: 3304 - RNA, 19 nt, Artificial Sequence
  Description of Artificial Sequence: Synthetic oligonucleotide
gccaaggagaucaugcagc

SEQ ID NO: 3305 - RNA, 19 nt, Artificial Sequence
  Description of Artificial Sequence: Synthetic oligonucleotide
gcccacacacucaccgaga

SEQ ID NO: 3306 - RNA, 19 nt, Artificial Sequence
  Description of Artificial Sequence: Synthetic oligonucleotide
gcccccgaggugcuggagg

SEQ ID NO: 3307 - RNA, 19 nt, Artificial Sequence
  Description of Artificial Sequence: Synthetic oligonucleotide
ggacaaugacuacggccgu

SEQ ID NO: 3308 - RNA, 19 nt, Artificial Sequence
  Description of Artificial Sequence: Synthetic oligonucleotide
ggcccccgaggugcuggag

SEQ ID NO: 3309 - RNA, 19 nt, Artificial Sequence
  Description of Artificial Sequence: Synthetic oligonucleotide
guaccuggcccccgaggug

SEQ ID NO: 3310 - RNA, 19 nt, Artificial Sequence
  Description of Artificial Sequence: Synthetic oligonucleotide
gucauggaguacgccaacg

SEQ ID NO: 3311 - RNA, 19 nt, Artificial Sequence
  Description of Artificial Sequence: Synthetic oligonucleotide
uaccuggcccccgaggugc

SEQ ID NO: 3312 - RNA, 19 nt, Artificial Sequence
  Description of Artificial Sequence: Synthetic oligonucleotide
ucaagccccaggucacguc

SEQ ID NO: 3313 - RNA, 19 nt, Artificial Sequence
  Description of Artificial Sequence: Synthetic oligonucleotide
ucaccgagaaccgcguccu

SEQ ID NO: 3314 - RNA, 19 nt, Artificial Sequence
  Description of Artificial Sequence: Synthetic oligonucleotide
ucaugcuggacaaggacgg

SEQ ID NO: 3315 - RNA, 19 nt, Artificial Sequence
  Description of Artificial Sequence: Synthetic oligonucleotide
ucauggaguacgccaacgg

SEQ ID NO: 3316 - RNA, 19 nt, Artificial Sequence
  Description of Artificial Sequence: Synthetic oligonucleotide
uccuggugaaggagaaggc

SEQ ID NO: 3317 - RNA, 19 nt, Artificial Sequence
  Description of Artificial Sequence: Synthetic oligonucleotide
ugcuuugucauggaguacg

SEQ ID NO: 3318 - RNA, 19 nt, Artificial Sequence
  Description of Artificial Sequence: Synthetic oligonucleotide
uggcccccgaggugcugga

SEQ ID NO: 3319 - RNA, 19 nt, Artificial Sequence
  Description of Artificial Sequence: Synthetic oligonucleotide
uggggguggccaucccugg

SEQ ID NO: 3320 - RNA, 19 nt, Artificial Sequence
  Description of Artificial Sequence: Synthetic oligonucleotide
uggugaaggagaaggccac

SEQ ID NO: 3321 - RNA, 19 nt, Artificial Sequence
  Description of Artificial Sequence: Synthetic oligonucleotide
uucaagccccaggucacgu

SEQ ID NO: 3322 - RNA, 19 nt, Artificial Sequence
  Description of Artificial Sequence: Synthetic oligonucleotide
uugucauggaguacgccaa

SEQ ID NO: 3323 - RNA, 19 nt, Artificial Sequence
  Description of Artificial Sequence: Synthetic oligonucleotide
uuugucauggaguacgcca

SEQ ID NO: 3324 - RNA, 19 nt, Artificial Sequence
  Description of Artificial Sequence: Synthetic oligonucleotide
aaugacuacggccgugcag

SEQ ID NO: 3325 - RNA, 19 nt, Artificial Sequence
  Description of Artificial Sequence: Synthetic oligonucleotide
augacuacggccgugcagu

SEQ ID NO: 3326 - RNA, 19 nt, Artificial Sequence
  Description of Artificial Sequence: Synthetic oligonucleotide
ccccucaacaacuucucug

SEQ ID NO: 3327 - RNA, 19 nt, Artificial Sequence
  Description of Artificial Sequence: Synthetic oligonucleotide
cccucaacaacuucucugu

SEQ ID NO: 3328 - RNA, 19 nt, Artificial Sequence
  Description of Artificial Sequence: Synthetic oligonucleotide
cguguguucuccgaggacc

SEQ ID NO: 3329 - RNA, 19 nt, Artificial Sequence
  Description of Artificial Sequence: Synthetic oligonucleotide
cucaacaacuucucugugg

SEQ ID NO: 3330 - RNA, 19 nt, Artificial Sequence
  Description of Artificial Sequence: Synthetic oligonucleotide
gagcguguguucuccgagg

SEQ ID NO: 3331 - RNA, 19 nt, Artificial Sequence
  Description of Artificial Sequence: Synthetic oligonucleotide
gcguguguucuccgaggac

SEQ ID NO: 3332 - RNA, 19 nt, Artificial Sequence
  Description of Artificial Sequence: Synthetic oligonucleotide
guguguucuccgaggaccg

SEQ ID NO: 3333 - RNA, 19 nt, Artificial Sequence
  Description of Artificial Sequence: Synthetic oligonucleotide
ucaacaacuucucuguggc

SEQ ID NO: 3334 - RNA, 19 nt, Artificial Sequence
  Description of Artificial Sequence: Synthetic oligonucleotide
uccccucaacaacuucucu

SEQ ID NO: 3335 - RNA, 19 nt, Artificial Sequence
  Description of Artificial Sequence: Synthetic oligonucleotide
aaggaagucaucauugcca

SEQ ID NO: 3336 - RNA, 19 nt, Artificial Sequence
  Description of Artificial Sequence: Synthetic oligonucleotide
aagucaucauugccaagga

SEQ ID NO: 3337 - RNA, 19 nt, Artificial Sequence
  Description of Artificial Sequence: Synthetic oligonucleotide
acaucaagaucacugacuu

SEQ ID NO: 3338 - RNA, 19 nt, Artificial Sequence
  Description of Artificial Sequence: Synthetic oligonucleotide
acccuucaaaccucagguc

SEQ ID NO: 3339 - RNA, 19 nt, Artificial Sequence
  Description of Artificial Sequence: Synthetic oligonucleotide
acaucaagcuggaaaaccu

SEQ ID NO: 3340 - RNA, 19 nt, Artificial Sequence
  Description of Artificial Sequence: Synthetic oligonucleotide
ccgccgccgcugccgcugc

SEQ ID NO: 3341 - RNA, 19 nt, Artificial Sequence
  Description of Artificial Sequence: Synthetic oligonucleotide
acggggccaccaugaaaac

SEQ ID NO: 3342 - RNA, 19 nt, Artificial Sequence
  Description of Artificial Sequence: Synthetic oligonucleotide
aggaagucaucauugccaa

SEQ ID NO: 3343 - RNA, 19 nt, Artificial Sequence
  Description of Artificial Sequence: Synthetic oligonucleotide
aggccaagucccugcuugc

SEQ ID NO: 3344 - RNA, 19 nt, Artificial Sequence
  Description of Artificial Sequence: Synthetic oligonucleotide
aauacaucaagaccuggag

SEQ ID NO: 3345 - RNA, 19 nt, Artificial Sequence
  Description of Artificial Sequence: Synthetic oligonucleotide
cacaucaagaucacugacu

SEQ ID NO: 3346 - RNA, 19 nt, Artificial Sequence
  Description of Artificial Sequence: Synthetic oligonucleotide
cacccuucaaaccucaggu

SEQ ID NO: 3347 - RNA, 19 nt, Artificial Sequence
  Description of Artificial Sequence: Synthetic oligonucleotide
gaaugccagcugaugaaga

SEQ ID NO: 3348 - RNA, 19 nt, Artificial Sequence
  Description of Artificial Sequence: Synthetic oligonucleotide
ccacccuucaaaccucagg

SEQ ID NO: 3349 - RNA, 19 nt, Artificial Sequence
  Description of Artificial Sequence: Synthetic oligonucleotide
cccuucaaaccucagguca

SEQ ID NO: 3350 - RNA, 19 nt, Artificial Sequence
  Description of Artificial Sequence: Synthetic oligonucleotide
caucaagcuggaaaaccuc

SEQ ID NO: 3351 - RNA, 19 nt, Artificial Sequence
  Description of Artificial Sequence: Synthetic oligonucleotide
ccucaugcuggacaaagau

SEQ ID NO: 3352 - RNA, 19 nt, Artificial Sequence
  Description of Artificial Sequence: Synthetic oligonucleotide
ccuucaaaccucaggucac

SEQ ID NO: 3353 - RNA, 19 nt, Artificial Sequence
  Description of Artificial Sequence: Synthetic oligonucleotide
cgccgccgcugccgcugcc

SEQ ID NO: 3354 - RNA, 19 nt, Artificial Sequence
  Description of Artificial Sequence: Synthetic oligonucleotide
aucaagcuggaaaaccuca

SEQ ID NO: 3355 - RNA, 19 nt, Artificial Sequence
  Description of Artificial Sequence: Synthetic oligonucleotide
cuccuacucggccagcauc

SEQ ID NO: 3356 - RNA, 19 nt, Artificial Sequence
  Description of Artificial Sequence: Synthetic oligonucleotide
cuucaaaccucaggucacg

SEQ ID NO: 3357 - RNA, 19 nt, Artificial Sequence
  Description of Artificial Sequence: Synthetic oligonucleotide
gaaggaagucaucauugcc

SEQ ID NO: 3358 - RNA, 19 nt, Artificial Sequence
  Description of Artificial Sequence: Synthetic oligonucleotide
gaagucaucauugccaagg

SEQ ID NO: 3359 - RNA, 19 nt, Artificial Sequence
  Description of Artificial Sequence: Synthetic oligonucleotide
gacaucaagcuggaaaacc

SEQ ID NO: 3360 - RNA, 19 nt, Artificial Sequence
  Description of Artificial Sequence: Synthetic oligonucleotide
gccgccgccgcugccgcug

SEQ ID NO: 3361 - RNA, 19 nt, Artificial Sequence
  Description of Artificial Sequence: Synthetic oligonucleotide
gacggggccaccaugaaaa

SEQ ID NO: 3362 - RNA, 19 nt, Artificial Sequence
  Description of Artificial Sequence: Synthetic oligonucleotide
gaggccaagucccugcuug

SEQ ID NO: 3363 - RNA, 19 nt, Artificial Sequence
  Description of Artificial Sequence: Synthetic oligonucleotide
gaauacaucaagaccugga

SEQ ID NO: 3364 - RNA, 19 nt, Artificial Sequence
  Description of Artificial Sequence: Synthetic oligonucleotide
ggaagucaucauugccaag

SEQ ID NO: 3365 - RNA, 19 nt, Artificial Sequence
  Description of Artificial Sequence: Synthetic oligonucleotide
ugaauacaucaagaccugg

SEQ ID NO: 3366 - RNA, 19 nt, Artificial Sequence
  Description of Artificial Sequence: Synthetic oligonucleotide
ggccgcgacccaacaccuu

SEQ ID NO: 3367 - RNA, 19 nt, Artificial Sequence
  Description of Artificial Sequence: Synthetic oligonucleotide
gugaauacaucaagaccug

SEQ ID NO: 3368 - RNA, 19 nt, Artificial Sequence
  Description of Artificial Sequence: Synthetic oligonucleotide
ggugaauacaucaagaccu

SEQ ID NO: 3369 - RNA, 19 nt, Artificial Sequence
  Description of Artificial Sequence: Synthetic oligonucleotide
ggggccaccaugaaaaccu

SEQ ID NO: 3370 - RNA, 19 nt, Artificial Sequence
  Description of Artificial Sequence: Synthetic oligonucleotide
auacaucaagaccuggagg

SEQ ID NO: 3371 - RNA, 19 nt, Artificial Sequence
  Description of Artificial Sequence: Synthetic oligonucleotide
gggccaccaugaaaaccuu

SEQ ID NO: 3372 - RNA, 19 nt, Artificial Sequence
  Description of Artificial Sequence: Synthetic oligonucleotide
augccagcugaugaagacc

SEQ ID NO: 3373 - RNA, 19 nt, Artificial Sequence
  Description of Artificial Sequence: Synthetic oligonucleotide
uacaaccaggaccacgagc

SEQ ID NO: 3374 - RNA, 19 nt, Artificial Sequence
  Description of Artificial Sequence: Synthetic oligonucleotide
ucaaaccucaggucacguc

SEQ ID NO: 3375 - RNA, 19 nt, Artificial Sequence
  Description of Artificial Sequence: Synthetic oligonucleotide
ucuccuacucggccagcau

SEQ ID NO: 3376 - RNA, 19 nt, Artificial Sequence
  Description of Artificial Sequence: Synthetic oligonucleotide
gccuuccagacccacgacc

SEQ ID NO: 3377 - RNA, 19 nt, Artificial Sequence
  Description of Artificial Sequence: Synthetic oligonucleotide
uucaaaccucaggucacgu

SEQ ID NO: 3378 - RNA, 19 nt, Artificial Sequence
  Description of Artificial Sequence: Synthetic oligonucleotide
acaaugacuauggccgggc

SEQ ID NO: 3379 - RNA, 19 nt, Artificial Sequence
  Description of Artificial Sequence: Synthetic oligonucleotide
accaugaaaaccuucugug

SEQ ID NO: 3380 - RNA, 19 nt, Artificial Sequence
  Description of Artificial Sequence: Synthetic oligonucleotide
agucaucauugccaaggau

SEQ ID NO: 3381 - RNA, 19 nt, Artificial Sequence
  Description of Artificial Sequence: Synthetic oligonucleotide
aucauugccaaggaugaag

SEQ ID NO: 3382 - RNA, 19 nt, Artificial Sequence
  Description of Artificial Sequence: Synthetic oligonucleotide
caccaugaaaaccuucugu

SEQ ID NO: 3383 - RNA, 19 nt, Artificial Sequence
  Description of Artificial Sequence: Synthetic oligonucleotide
caucauugccaaggaugaa

SEQ ID NO: 3384 - RNA, 19 nt, Artificial Sequence
  Description of Artificial Sequence: Synthetic oligonucleotide
ccaugaaaaccuucugugg

SEQ ID NO: 3385 - RNA, 19 nt, Artificial Sequence
  Description of Artificial Sequence: Synthetic oligonucleotide
gacaaugacuauggccggg

SEQ ID NO: 3386 - RNA, 19 nt, Artificial Sequence
  Description of Artificial Sequence: Synthetic oligonucleotide
gucaucauugccaaggaug

SEQ ID NO: 3387 - RNA, 19 nt, Artificial Sequence
  Description of Artificial Sequence: Synthetic oligonucleotide
ucaucauugccaaggauga

SEQ ID NO: 3388 - RNA, 19 nt, Artificial Sequence
  Description of Artificial Sequence: Synthetic oligonucleotide
ucauugccaaggaugaagu

SEQ ID NO: 3389 - RNA, 19 nt, Artificial Sequence
  Description of Artificial Sequence: Synthetic oligonucleotide
ugcuuugugauggaguaug

SEQ ID NO: 3390 - RNA, 19 nt, Artificial Sequence
  Description of Artificial Sequence: Synthetic oligonucleotide
ugugcuuugugauggagua

SEQ ID NO: 3391 - RNA, 19 nt, Artificial Sequence
  Description of Artificial Sequence: Synthetic oligonucleotide
aaaucauugcuuucagggc

SEQ ID NO: 3392 - RNA, 19 nt, Artificial Sequence
  Description of Artificial Sequence: Synthetic oligonucleotide
aaucauugcuuucagggcu

SEQ ID NO: 3393 - RNA, 19 nt, Artificial Sequence
  Description of Artificial Sequence: Synthetic oligonucleotide
caguagacugguggggccu

SEQ ID NO: 3394 - RNA, 19 nt, Artificial Sequence
  Description of Artificial Sequence: Synthetic oligonucleotide
ccaccaugaagacauucug

SEQ ID NO: 3395 - RNA, 19 nt, Artificial Sequence
  Description of Artificial Sequence: Synthetic oligonucleotide
ccgagcaguagacuggugg

SEQ ID NO: 3396 - RNA, 19 nt, Artificial Sequence
  Description of Artificial Sequence: Synthetic oligonucleotide
cgagcaguagacugguggg

SEQ ID NO: 3397 - RNA, 19 nt, Artificial Sequence
  Description of Artificial Sequence: Synthetic oligonucleotide
gcaguagacugguggggcc

SEQ ID NO: 3398 - RNA, 19 nt, Artificial Sequence
  Description of Artificial Sequence: Synthetic oligonucleotide
gccaccaugaagacauucu

SEQ ID NO: 3399 - RNA, 19 nt, Artificial Sequence
  Description of Artificial Sequence: Synthetic oligonucleotide
accuuucuacaaccaggac

SEQ ID NO: 3400 - RNA, 19 nt, Artificial Sequence
  Description of Artificial Sequence: Synthetic oligonucleotide
gccgagcaguagacuggug

SEQ ID NO: 3401 - RNA, 19 nt, Artificial Sequence
  Description of Artificial Sequence: Synthetic oligonucleotide
ggccgagcaguagacuggu

SEQ ID NO: 3402 - RNA, 19 nt, Artificial Sequence
  Description of Artificial Sequence: Synthetic oligonucleotide
gucauguaugaaaugaugu

SEQ ID NO: 3403 - RNA, 19 nt, Artificial Sequence
  Description of Artificial Sequence: Synthetic oligonucleotide
gagcaguagacuggugggg

SEQ ID NO: 3404 - RNA, 19 nt, Artificial Sequence
  Description of Artificial Sequence: Synthetic oligonucleotide
ucauguaugaaaugaugug

SEQ ID NO: 3405 - RNA, 19 nt, Artificial Sequence
  Description of Artificial Sequence: Synthetic oligonucleotide
uaccuuucuacaaccagga

SEQ ID NO: 3406 - RNA, 19 nt, Artificial Sequence
  Description of Artificial Sequence: Synthetic oligonucleotide
aaagauggccacauaaaaa

SEQ ID NO: 3407 - RNA, 19 nt, Artificial Sequence
  Description of Artificial Sequence: Synthetic oligonucleotide
aagauggccacauaaaaau

SEQ ID NO: 3408 - RNA, 19 nt, Artificial Sequence
  Description of Artificial Sequence: Synthetic oligonucleotide
aaugacuauggccgagcag

SEQ ID NO: 3409 - RNA, 19 nt, Artificial Sequence
  Description of Artificial Sequence: Synthetic oligonucleotide
auaaugacuauggccgagc

SEQ ID NO: 3410 - RNA, 19 nt, Artificial Sequence
  Description of Artificial Sequence: Synthetic oligonucleotide
aagauaaugacuauggccg

SEQ ID NO: 3411 - RNA, 19 nt, Artificial Sequence
  Description of Artificial Sequence: Synthetic oligonucleotide
augacuauggccgagcagu

SEQ ID NO: 3412 - RNA, 19 nt, Artificial Sequence
  Description of Artificial Sequence: Synthetic oligonucleotide
caaagauggccacauaaaa

SEQ ID NO: 3413 - RNA, 19 nt, Artificial Sequence
  Description of Artificial Sequence: Synthetic oligonucleotide
cuggaggccaagauacuuc

SEQ ID NO: 3414 - RNA, 19 nt, Artificial Sequence
  Description of Artificial Sequence: Synthetic oligonucleotide
gauaaugacuauggccgag

SEQ ID NO: 3415 - RNA, 19 nt, Artificial Sequence
  Description of Artificial Sequence: Synthetic oligonucleotide
gaagauaaugacuauggcc

SEQ ID NO: 3416 - RNA, 19 nt, Artificial Sequence
  Description of Artificial Sequence: Synthetic oligonucleotide
ggaggccaagauacuuccu

SEQ ID NO: 3417 - RNA, 19 nt, Artificial Sequence
  Description of Artificial Sequence: Synthetic oligonucleotide
ggugcagaaauugucucug

SEQ ID NO: 3418 - RNA, 19 nt, Artificial Sequence
  Description of Artificial Sequence: Synthetic oligonucleotide
gugcagaaauugucucugc

SEQ ID NO: 3419 - RNA, 19 nt, Artificial Sequence
  Description of Artificial Sequence: Synthetic oligonucleotide
guguuuugugauggaauau

SEQ ID NO: 3420 - RNA, 19 nt, Artificial Sequence
  Description of Artificial Sequence: Synthetic oligonucleotide
ugaaauauuccuuccagac

SEQ ID NO: 3421 - RNA, 19 nt, Artificial Sequence
  Description of Artificial Sequence: Synthetic oligonucleotide
uguuuugugauggaauaug

SEQ ID NO: 3422 - RNA, 19 nt, Artificial Sequence
  Description of Artificial Sequence: Synthetic oligonucleotide
uggugcagaaauugucucu

SEQ ID NO: 3423 - RNA, 19 nt, Artificial Sequence
  Description of Artificial Sequence: Synthetic oligonucleotide
uguguuuugugauggaaua

SEQ ID NO: 3424 - RNA, 19 nt, Artificial Sequence
  Description of Artificial Sequence: Synthetic oligonucleotide
aacuccaggcaccccuucc

SEQ ID NO: 3425 - RNA, 19 nt, Artificial Sequence
  Description of Artificial Sequence: Synthetic oligonucleotide
aagaccuggcggccacgcu

SEQ ID NO: 3426 - RNA, 19 nt, Artificial Sequence
  Description of Artificial Sequence: Synthetic oligonucleotide
aaggaagucaucguggcca

SEQ ID NO: 3427 - RNA, 19 nt, Artificial Sequence
  Description of Artificial Sequence: Synthetic oligonucleotide
aagucaucguggccaagga

SEQ ID NO: 3428 - RNA, 19 nt, Artificial Sequence
  Description of Artificial Sequence: Synthetic oligonucleotide
acauuaagaucacagacuu

SEQ ID NO: 3429 - RNA, 19 nt, Artificial Sequence
  Description of Artificial Sequence: Synthetic oligonucleotide
accaucacaccaccugacc

SEQ ID NO: 3430 - RNA, 19 nt, Artificial Sequence
  Description of Artificial Sequence: Synthetic oligonucleotide
accgccucugcuuugucau

SEQ ID NO: 3431 - RNA, 19 nt, Artificial Sequence
  Description of Artificial Sequence: Synthetic oligonucleotide
accucaagcuggagaaccu

SEQ ID NO: 3432 - RNA, 19 nt, Artificial Sequence
  Description of Artificial Sequence: Synthetic oligonucleotide
accuggcggccacgcuacu

SEQ ID NO: 3433 - RNA, 19 nt, Artificial Sequence
  Description of Artificial Sequence: Synthetic oligonucleotide
accuucauuggcuacaagg

SEQ ID NO: 3434 - RNA, 19 nt, Artificial Sequence
  Description of Artificial Sequence: Synthetic oligonucleotide
acgcugccgcugccgcugc

SEQ ID NO: 3435 - RNA, 19 nt, Artificial Sequence
  Description of Artificial Sequence: Synthetic oligonucleotide
acuccaggcaccccuuccu

SEQ ID NO: 3436 - RNA, 19 nt, Artificial Sequence
  Description of Artificial Sequence: Synthetic oligonucleotide
agaacuccaggcaccccuu

SEQ ID NO: 3437 - RNA, 19 nt, Artificial Sequence
  Description of Artificial Sequence: Synthetic oligonucleotide
agcugaugaagacggagcg

SEQ ID NO: 3438 - RNA, 19 nt, Artificial Sequence
  Description of Artificial Sequence: Synthetic oligonucleotide
aggaagucaucguggccaa

SEQ ID NO: 3439 - RNA, 19 nt, Artificial Sequence
  Description of Artificial Sequence: Synthetic oligonucleotide
aggcaccccuuccucacag

SEQ ID NO: 3440 - RNA, 19 nt, Artificial Sequence
  Description of Artificial Sequence: Synthetic oligonucleotide
aggccaaguccuugcuuuc

SEQ ID NO: 3441 - RNA, 19 nt, Artificial Sequence
  Description of Artificial Sequence: Synthetic oligonucleotide
aggccccacuucccccagu

SEQ ID NO: 3442 - RNA, 19 nt, Artificial Sequence
  Description of Artificial Sequence: Synthetic oligonucleotide
aguacaucaagaccuggcg

SEQ ID NO: 3443 - RNA, 19 nt, Artificial Sequence
  Description of Artificial Sequence: Synthetic oligonucleotide
aucaccaucacaccaccug

SEQ ID NO: 3444 - RNA, 19 nt, Artificial Sequence
  Description of Artificial Sequence: Synthetic oligonucleotide
auuggcuacaaggagcggc

SEQ ID NO: 3445 - RNA, 19 nt, Artificial Sequence
  Description of Artificial Sequence: Synthetic oligonucleotide
cacauuaagaucacagacu

SEQ ID NO: 3446 - RNA, 19 nt, Artificial Sequence
  Description of Artificial Sequence: Synthetic oligonucleotide
cagaacuccaggcaccccu

SEQ ID NO: 3447 - RNA, 19 nt, Artificial Sequence
  Description of Artificial Sequence: Synthetic oligonucleotide
cagcugaugaagacggagc

SEQ ID NO: 3448 - RNA, 19 nt, Artificial Sequence
  Description of Artificial Sequence: Synthetic oligonucleotide
cagugccagcugaugaaga

SEQ ID NO: 3449 - RNA, 19 nt, Artificial Sequence
  Description of Artificial Sequence: Synthetic oligonucleotide
cauuggcuacaaggagcgg

SEQ ID NO: 3450 - RNA, 19 nt, Artificial Sequence
  Description of Artificial Sequence: Synthetic oligonucleotide
ccaccaugaagaccuuuug

SEQ ID NO: 3451 - RNA, 19 nt, Artificial Sequence
  Description of Artificial Sequence: Synthetic oligonucleotide
cccgggagcguguguucuc

SEQ ID NO: 3452 - RNA, 19 nt, Artificial Sequence
  Description of Artificial Sequence: Synthetic oligonucleotide
ccgccucugcuuugucaug

SEQ ID NO: 3453 - RNA, 19 nt, Artificial Sequence
  Description of Artificial Sequence: Synthetic oligonucleotide
ccucaagcuggagaaccuc

SEQ ID NO: 3454 - RNA, 19 nt, Artificial Sequence
  Description of Artificial Sequence: Synthetic oligonucleotide
ccucugcuuugucauggag

SEQ ID NO: 3455 - RNA, 19 nt, Artificial Sequence
  Description of Artificial Sequence: Synthetic oligonucleotide
ccuggcggccacgcuacuu

SEQ ID NO: 3456 - RNA, 19 nt, Artificial Sequence
  Description of Artificial Sequence: Synthetic oligonucleotide
cgaccgccucugcuuuguc

SEQ ID NO: 3457 - RNA, 19 nt, Artificial Sequence
  Description of Artificial Sequence: Synthetic oligonucleotide
cgccucugcuuugucaugg

SEQ ID NO: 3458 - RNA, 19 nt, Artificial Sequence
  Description of Artificial Sequence: Synthetic oligonucleotide
cgcugccgcugccgcugca

SEQ ID NO: 3459 - RNA, 19 nt, Artificial Sequence
  Description of Artificial Sequence: Synthetic oligonucleotide
cgcuucccgcgcacgcuug

SEQ ID NO: 3460 - RNA, 19 nt, Artificial Sequence
  Description of Artificial Sequence: Synthetic oligonucleotide
cggugccaccaugaagacc

SEQ ID NO: 3461 - RNA, 19 nt, Artificial Sequence
  Description of Artificial Sequence: Synthetic oligonucleotide
cgugcaguggacugguggg

SEQ ID NO: 3462 - RNA, 19 nt, Artificial Sequence
  Description of Artificial Sequence: Synthetic oligonucleotide
cucaagcuggagaaccuca

SEQ ID NO: 3463 - RNA, 19 nt, Artificial Sequence
  Description of Artificial Sequence: Synthetic oligonucleotide
cuccaggcaccccuuccuc

SEQ ID NO: 3464 - RNA, 19 nt, Artificial Sequence
  Description of Artificial Sequence: Synthetic oligonucleotide
cuccuacucggccagcggc

SEQ ID NO: 3465 - RNA, 19 nt, Artificial Sequence
  Description of Artificial Sequence: Synthetic oligonucleotide
cucugcuuugucauggagu

SEQ ID NO: 3466 - RNA, 19 nt, Artificial Sequence
  Description of Artificial Sequence: Synthetic oligonucleotide
cugaugaagacggagcggc

SEQ ID NO: 3467 - RNA, 19 nt, Artificial Sequence
  Description of Artificial Sequence: Synthetic oligonucleotide
cugcagaacuccaggcacc

SEQ ID NO: 3468 - RNA, 19 nt, Artificial Sequence
  Description of Artificial Sequence: Synthetic oligonucleotide
cuuuuugagcucauccuca

SEQ ID NO: 3469 - RNA, 19 nt, Artificial Sequence
  Description of Artificial Sequence: Synthetic oligonucleotide
gaaccucaugcuggacaag

SEQ ID NO: 3470 - RNA, 19 nt, Artificial Sequence
  Description of Artificial Sequence: Synthetic oligonucleotide
gaacuccaggcaccccuuc

SEQ ID NO: 3471 - RNA, 19 nt, Artificial Sequence
  Description of Artificial Sequence: Synthetic oligonucleotide
gaaggaagucaucguggcc

SEQ ID NO: 3472 - RNA, 19 nt, Artificial Sequence
  Description of Artificial Sequence: Synthetic oligonucleotide
gaagucaucguggccaagg

SEQ ID NO: 3473 - RNA, 19 nt, Artificial Sequence
  Description of Artificial Sequence: Synthetic oligonucleotide
gaccgccucugcuuuguca

SEQ ID NO: 3474 - RNA, 19 nt, Artificial Sequence
  Description of Artificial Sequence: Synthetic oligonucleotide
gaccucaagcuggagaacc

SEQ ID NO: 3475 - RNA, 19 nt, Artificial Sequence
  Description of Artificial Sequence: Synthetic oligonucleotide
gaccuggcggccacgcuac

SEQ ID NO: 3476 - RNA, 19 nt, Artificial Sequence
  Description of Artificial Sequence: Synthetic oligonucleotide
gacgcugccgcugccgcug

SEQ ID NO: 3477 - RNA, 19 nt, Artificial Sequence
  Description of Artificial Sequence: Synthetic oligonucleotide
gacggugccaccaugaaga

SEQ ID NO: 3478 - RNA, 19 nt, Artificial Sequence
  Description of Artificial Sequence: Synthetic oligonucleotide
gaggagcgggaggagugga

SEQ ID NO: 3479 - RNA, 19 nt, Artificial Sequence
  Description of Artificial Sequence: Synthetic oligonucleotide
gaggccaaguccuugcuuu

SEQ ID NO: 3480 - RNA, 19 nt, Artificial Sequence
  Description of Artificial Sequence: Synthetic oligonucleotide
gaguacaucaagaccuggc

SEQ ID NO: 3481 - RNA, 19 nt, Artificial Sequence
  Description of Artificial Sequence: Synthetic oligonucleotide
gcaccuucauuggcuacaa

SEQ ID NO: 3482 - RNA, 19 nt, Artificial Sequence
  Description of Artificial Sequence: Synthetic oligonucleotide
gccaccaugaagaccuuuu

SEQ ID NO: 3483 - RNA, 19 nt, Artificial Sequence
  Description of Artificial Sequence: Synthetic oligonucleotide
gccgugcaguggacuggug

SEQ ID NO: 3484 - RNA, 19 nt, Artificial Sequence
  Description of Artificial Sequence: Synthetic oligonucleotide
gccucugcuuugucaugga

SEQ ID NO: 3485 - RNA, 19 nt, Artificial Sequence
  Description of Artificial Sequence: Synthetic oligonucleotide
gcuucccgcgcacgcuugg

SEQ ID NO: 3486 - RNA, 19 nt, Artificial Sequence
  Description of Artificial Sequence: Synthetic oligonucleotide
ggaguacaucaagaccugg

SEQ ID NO: 3487 - RNA, 19 nt, Artificial Sequence
  Description of Artificial Sequence: Synthetic oligonucleotide
ggcaccuucauuggcuaca

SEQ ID NO: 3488 - RNA, 19 nt, Artificial Sequence
  Description of Artificial Sequence: Synthetic oligonucleotide
ggccacgcuacuuccuccu

SEQ ID NO: 3489 - RNA, 19 nt, Artificial Sequence
  Description of Artificial Sequence: Synthetic oligonucleotide
ggccccggcccaacaccuu

SEQ ID NO: 3490 - RNA, 19 nt, Artificial Sequence
  Description of Artificial Sequence: Synthetic oligonucleotide
ggccgugcaguggacuggu

SEQ ID NO: 3491 - RNA, 19 nt, Artificial Sequence
  Description of Artificial Sequence: Synthetic oligonucleotide
ggcggccacgcuacuuccu

SEQ ID NO: 3492 - RNA, 19 nt, Artificial Sequence
  Description of Artificial Sequence: Synthetic oligonucleotide
gggaguacaucaagaccug

SEQ ID NO: 3493 - RNA, 19 nt, Artificial Sequence
  Description of Artificial Sequence: Synthetic oligonucleotide
ggggaguacaucaagaccu

SEQ ID NO: 3494 - RNA, 19 nt, Artificial Sequence
  Description of Artificial Sequence: Synthetic oligonucleotide
ggugccaccaugaagaccu

SEQ ID NO: 3495 - RNA, 19 nt, Artificial Sequence
  Description of Artificial Sequence: Synthetic oligonucleotide
guacaucaagaccuggcgg

SEQ ID NO: 3496 - RNA, 19 nt, Artificial Sequence
  Description of Artificial Sequence: Synthetic oligonucleotide
gucccgaggccaaguccuu

SEQ ID NO: 3497 - RNA, 19 nt, Artificial Sequence
  Description of Artificial Sequence: Synthetic oligonucleotide
guccugcagaacuccaggc

SEQ ID NO: 3498 - RNA, 19 nt, Artificial Sequence
  Description of Artificial Sequence: Synthetic oligonucleotide
gugcaguggacuggugggg

SEQ ID NO: 3499 - RNA, 19 nt, Artificial Sequence
  Description of Artificial Sequence: Synthetic oligonucleotide
gugccaccaugaagaccuu

SEQ ID NO: 3500 - RNA, 19 nt, Artificial Sequence
  Description of Artificial Sequence: Synthetic oligonucleotide
gugccagcugaugaagacg

SEQ ID NO: 3501 - RNA, 19 nt, Artificial Sequence
  Description of Artificial Sequence: Synthetic oligonucleotide
uaccgggaccucaagcugg

SEQ ID NO: 3502 - RNA, 19 nt, Artificial Sequence
  Description of Artificial Sequence: Synthetic oligonucleotide
uacgccaugaagauccuca

SEQ ID NO: 3503 - RNA, 19 nt, Artificial Sequence
  Description of Artificial Sequence: Synthetic oligonucleotide
ucaaaaaaaaaaaaaaaaa

SEQ ID NO: 3504 - RNA, 19 nt, Artificial Sequence
  Description of Artificial Sequence: Synthetic oligonucleotide
ucaccaucacaccaccuga

SEQ ID NO: 3505 - RNA, 19 nt, Artificial Sequence
  Description of Artificial Sequence: Synthetic oligonucleotide
ucauuggcuacaaggagcg

SEQ ID NO: 3506 - RNA, 19 nt, Artificial Sequence
  Description of Artificial Sequence: Synthetic oligonucleotide
uccaggcaccccuuccuca

SEQ ID NO: 3507 - RNA, 19 nt, Artificial Sequence
  Description of Artificial Sequence: Synthetic oligonucleotide
ucccgggagcguguguucu

SEQ ID NO: 3508 - RNA, 19 nt, Artificial Sequence
  Description of Artificial Sequence: Synthetic oligonucleotide
uccucacagcccugaagua

SEQ ID NO: 3509 - RNA, 19 nt, Artificial Sequence
  Description of Artificial Sequence: Synthetic oligonucleotide
uccugcagaacuccaggca

SEQ ID NO: 3510 - RNA, 19 nt, Artificial Sequence
  Description of Artificial Sequence: Synthetic oligonucleotide
ucuccuacucggccagcgg

SEQ ID NO: 3511 - RNA, 19 nt, Artificial Sequence
  Description of Artificial Sequence: Synthetic oligonucleotide
ucugcuuugucauggagua

SEQ ID NO: 3512 - RNA, 19 nt, Artificial Sequence
  Description of Artificial Sequence: Synthetic oligonucleotide
ucuuuccagacccacgacc

SEQ ID NO: 3513 - RNA, 19 nt, Artificial Sequence
  Description of Artificial Sequence: Synthetic oligonucleotide
ugagcucauccucauggag

SEQ ID NO: 3514 - RNA, 19 nt, Artificial Sequence
  Description of Artificial Sequence: Synthetic oligonucleotide
ugcagaacuccaggcaccc

SEQ ID NO: 3515 - RNA, 19 nt, Artificial Sequence
  Description of Artificial Sequence: Synthetic oligonucleotide
ugcaguggacugguggggg

SEQ ID NO: 3516 - RNA, 19 nt, Artificial Sequence
  Description of Artificial Sequence: Synthetic oligonucleotide
uggcggccacgcuacuucc

SEQ ID NO: 3517 - RNA, 19 nt, Artificial Sequence
  Description of Artificial Sequence: Synthetic oligonucleotide
uucauuggcuacaaggagc

SEQ ID NO: 3518 - RNA, 19 nt, Artificial Sequence
  Description of Artificial Sequence: Synthetic oligonucleotide
uuccucacagcccugaagu

SEQ ID NO: 3519 - RNA, 19 nt, Artificial Sequence
  Description of Artificial Sequence: Synthetic oligonucleotide
uuggcuacaaggagcggcc

SEQ ID NO: 3520 - RNA, 19 nt, Artificial Sequence
  Description of Artificial Sequence: Synthetic oligonucleotide
uuuuugagcucauccucau

SEQ ID NO: 3521 - RNA, 19 nt, Artificial Sequence
  Description of Artificial Sequence: Synthetic oligonucleotide
aaguccuugcuuucagggc

SEQ ID NO: 3522 - RNA, 19 nt, Artificial Sequence
  Description of Artificial Sequence: Synthetic oligonucleotide
aguccuugcuuucagggcu

SEQ ID NO: 3523 - RNA, 19 nt, Artificial Sequence
  Description of Artificial Sequence: Synthetic oligonucleotide
ccaugagaagcuuuuugag

SEQ ID NO: 3524 - RNA, 19 nt, Artificial Sequence
  Description of Artificial Sequence: Synthetic oligonucleotide
aacaccaggcacccguucc

SEQ ID NO: 3525 - RNA, 19 nt, Artificial Sequence
  Description of Artificial Sequence: Synthetic oligonucleotide
aagaccuggaggccacggu

SEQ ID NO: 3526 - RNA, 19 nt, Artificial Sequence
  Description of Artificial Sequence: Synthetic oligonucleotide
acacagucaccgagagccg

SEQ ID NO: 3527 - RNA, 19 nt, Artificial Sequence
  Description of Artificial Sequence: Synthetic oligonucleotide
acaaucacacccccugacc

SEQ ID NO: 3528 - RNA, 19 nt, Artificial Sequence
  Description of Artificial Sequence: Synthetic oligonucleotide
accgccugugcuuugugau

SEQ ID NO: 3529 - RNA, 19 nt, Artificial Sequence
  Description of Artificial Sequence: Synthetic oligonucleotide
accgcgacaucaagcugga

SEQ ID NO: 3530 - RNA, 19 nt, Artificial Sequence
  Description of Artificial Sequence: Synthetic oligonucleotide
accuggcgccugaggugcu

SEQ ID NO: 3531 - RNA, 19 nt, Artificial Sequence
  Description of Artificial Sequence: Synthetic oligonucleotide
accuggaggccacgguacu

SEQ ID NO: 3532 - RNA, 19 nt, Artificial Sequence
  Description of Artificial Sequence: Synthetic oligonucleotide
uccuucauuggguacaagg

SEQ ID NO: 3533 - RNA, 19 nt, Artificial Sequence
  Description of Artificial Sequence: Synthetic oligonucleotide
augccaacgggggugagcu

SEQ ID NO: 3534 - RNA, 19 nt, Artificial Sequence
  Description of Artificial Sequence: Synthetic oligonucleotide
acaccaggcacccguuccu

SEQ ID NO: 3535 - RNA, 19 nt, Artificial Sequence
  Description of Artificial Sequence: Synthetic oligonucleotide
agaacaccaggcacccguu

SEQ ID NO: 3536 - RNA, 19 nt, Artificial Sequence
  Description of Artificial Sequence: Synthetic oligonucleotide
agaccuggaggccacggua

SEQ ID NO: 3537 - RNA, 19 nt, Artificial Sequence
  Description of Artificial Sequence: Synthetic oligonucleotide
agcugaugaagaccgagag

SEQ ID NO: 3538 - RNA, 19 nt, Artificial Sequence
  Description of Artificial Sequence: Synthetic oligonucleotide
gggagaaggccacuggccg

SEQ ID NO: 3539 - RNA, 19 nt, Artificial Sequence
  Description of Artificial Sequence: Synthetic oligonucleotide
aggcacccguuccucacug

SEQ ID NO: 3540 - RNA, 19 nt, Artificial Sequence
  Description of Artificial Sequence: Synthetic oligonucleotide
cggacccacuucccccagu

SEQ ID NO: 3541 - RNA, 19 nt, Artificial Sequence
  Description of Artificial Sequence: Synthetic oligonucleotide
ugggcugcuuaagaaggac

SEQ ID NO: 3542 - RNA, 19 nt, Artificial Sequence
  Description of Artificial Sequence: Synthetic oligonucleotide
aguaccuggcgccugaggu

SEQ ID NO: 3543 - RNA, 19 nt, Artificial Sequence
  Description of Artificial Sequence: Synthetic oligonucleotide
aguaugccaacggggguga

SEQ ID NO: 3544 - RNA, 19 nt, Artificial Sequence
  Description of Artificial Sequence: Synthetic oligonucleotide
aucacaaucacacccccug

SEQ ID NO: 3545 - RNA, 19 nt, Artificial Sequence
  Description of Artificial Sequence: Synthetic oligonucleotide
gucauacgcugccugcagu

SEQ ID NO: 3546 - RNA, 19 nt, Artificial Sequence
  Description of Artificial Sequence: Synthetic oligonucleotide
auccuggugcgggagaagg

SEQ ID NO: 3547 - RNA, 19 nt, Artificial Sequence
  Description of Artificial Sequence: Synthetic oligonucleotide
auuggguacaaggagaggc

SEQ ID NO: 3548 - RNA, 19 nt, Artificial Sequence
  Description of Artificial Sequence: Synthetic oligonucleotide
cuaaaaauaaaaaaaaaaa

SEQ ID NO: 3549 - RNA, 19 nt, Artificial Sequence
  Description of Artificial Sequence: Synthetic oligonucleotide
caagaccuggaggccacgg

SEQ ID NO: 3550 - RNA, 19 nt, Artificial Sequence
  Description of Artificial Sequence: Synthetic oligonucleotide
cacacagucaccgagagcc

SEQ ID NO: 3551 - RNA, 19 nt, Artificial Sequence
  Description of Artificial Sequence: Synthetic oligonucleotide
cacaaucacacccccugac

SEQ ID NO: 3552 - RNA, 19 nt, Artificial Sequence
  Description of Artificial Sequence: Synthetic oligonucleotide
cagaacaccaggcacccgu

SEQ ID NO: 3553 - RNA, 19 nt, Artificial Sequence
  Description of Artificial Sequence: Synthetic oligonucleotide
cagcugaugaagaccgaga

SEQ ID NO: 3554 - RNA, 19 nt, Artificial Sequence
  Description of Artificial Sequence: Synthetic oligonucleotide
cugggcugcuuaagaagga

SEQ ID NO: 3555 - RNA, 19 nt, Artificial Sequence
  Description of Artificial Sequence: Synthetic oligonucleotide
gauggaguaugccaacggg

SEQ ID NO: 3556 - RNA, 19 nt, Artificial Sequence
  Description of Artificial Sequence: Synthetic oligonucleotide
cauuggguacaaggagagg

SEQ ID NO: 3557 - RNA, 19 nt, Artificial Sequence
  Description of Artificial Sequence: Synthetic oligonucleotide
ccaaggaggucauggagca

SEQ ID NO: 3558 - RNA, 19 nt, Artificial Sequence
  Description of Artificial Sequence: Synthetic oligonucleotide
cgccugaggugcuggagga

SEQ ID NO: 3559 - RNA, 19 nt, Artificial Sequence
  Description of Artificial Sequence: Synthetic oligonucleotide
gccugaggugcuggaggac

SEQ ID NO: 3560 - RNA, 19 nt, Artificial Sequence
  Description of Artificial Sequence: Synthetic oligonucleotide
cccgggagcgugucuucac

SEQ ID NO: 3561 - RNA, 19 nt, Artificial Sequence
  Description of Artificial Sequence: Synthetic oligonucleotide
ccgccugugcuuugugaug

SEQ ID NO: 3562 - RNA, 19 nt, Artificial Sequence
  Description of Artificial Sequence: Synthetic oligonucleotide
ccgggccguggacuggugg

SEQ ID NO: 3563 - RNA, 19 nt, Artificial Sequence
  Description of Artificial Sequence: Synthetic oligonucleotide
ccugugcuuugugauggag

SEQ ID NO: 3564 - RNA, 19 nt, Artificial Sequence
  Description of Artificial Sequence: Synthetic oligonucleotide
ccuccagaacaccaggcac

SEQ ID NO: 3565 - RNA, 19 nt, Artificial Sequence
  Description of Artificial Sequence: Synthetic oligonucleotide
ccuggcgccugaggugcug

SEQ ID NO: 3566 - RNA, 19 nt, Artificial Sequence
  Description of Artificial Sequence: Synthetic oligonucleotide
ccuggaggccacgguacuu

SEQ ID NO: 3567 - RNA, 19 nt, Artificial Sequence
  Description of Artificial Sequence: Synthetic oligonucleotide
ccuggugcgggagaaggcc

SEQ ID NO: 3568 - RNA, 19 nt, Artificial Sequence
  Description of Artificial Sequence: Synthetic oligonucleotide
cgaccgccugugcuuugug

SEQ ID NO: 3569 - RNA, 19 nt, Artificial Sequence
  Description of Artificial Sequence: Synthetic oligonucleotide
cgccugugcuuugugaugg

SEQ ID NO: 3570 - RNA, 19 nt, Artificial Sequence
  Description of Artificial Sequence: Synthetic oligonucleotide
cgggccguggacugguggg

SEQ ID NO: 3571 - RNA, 19 nt, Artificial Sequence
  Description of Artificial Sequence: Synthetic oligonucleotide
caccaggcacccguuccuc

SEQ ID NO: 3572 - RNA, 19 nt, Artificial Sequence
  Description of Artificial Sequence: Synthetic oligonucleotide
cugugcuuugugauggagu

SEQ ID NO: 3573 - RNA, 19 nt, Artificial Sequence
  Description of Artificial Sequence: Synthetic oligonucleotide
cugaugaagaccgagaggc

SEQ ID NO: 3574 - RNA, 19 nt, Artificial Sequence
  Description of Artificial Sequence: Synthetic oligonucleotide
cuccagaacaccaggcacc

SEQ ID NO: 3575 - RNA, 19 nt, Artificial Sequence
  Description of Artificial Sequence: Synthetic oligonucleotide
cuggcgccugaggugcugg

SEQ ID NO: 3576 - RNA, 19 nt, Artificial Sequence
  Description of Artificial Sequence: Synthetic oligonucleotide
cuggugcgggagaaggcca

SEQ ID NO: 3577 - RNA, 19 nt, Artificial Sequence
  Description of Artificial Sequence: Synthetic oligonucleotide
cuuugugauggaguaugcc

SEQ ID NO: 3578 - RNA, 19 nt, Artificial Sequence
  Description of Artificial Sequence: Synthetic oligonucleotide
gaacaccaggcacccguuc

SEQ ID NO: 3579 - RNA, 19 nt, Artificial Sequence
  Description of Artificial Sequence: Synthetic oligonucleotide
gaccgccugugcuuuguga

SEQ ID NO: 3580 - RNA, 19 nt, Artificial Sequence
  Description of Artificial Sequence: Synthetic oligonucleotide
gaccuggaggccacgguac

SEQ ID NO: 3581 - RNA, 19 nt, Artificial Sequence
  Description of Artificial Sequence: Synthetic oligonucleotide
gacgagagggaggagugga

SEQ ID NO: 3582 - RNA, 19 nt, Artificial Sequence
  Description of Artificial Sequence: Synthetic oligonucleotide
gaguaccuggcgccugagg

SEQ ID NO: 3583 - RNA, 19 nt, Artificial Sequence
  Description of Artificial Sequence: Synthetic oligonucleotide
gaguaugccaacgggggug

SEQ ID NO: 3584 - RNA, 19 nt, Artificial Sequence
  Description of Artificial Sequence: Synthetic oligonucleotide
gcuccuucauuggguacaa

SEQ ID NO: 3585 - RNA, 19 nt, Artificial Sequence
  Description of Artificial Sequence: Synthetic oligonucleotide
gcagaggcuuggugggggg

SEQ ID NO: 3586 - RNA, 19 nt, Artificial Sequence
  Description of Artificial Sequence: Synthetic oligonucleotide
gccaaggaggucauggagc

SEQ ID NO: 3587 - RNA, 19 nt, Artificial Sequence
  Description of Artificial Sequence: Synthetic oligonucleotide
gcucacacagucaccgaga

SEQ ID NO: 3588 - RNA, 19 nt, Artificial Sequence
  Description of Artificial Sequence: Synthetic oligonucleotide
gcgccugaggugcuggagg

SEQ ID NO: 3589 - RNA, 19 nt, Artificial Sequence
  Description of Artificial Sequence: Synthetic oligonucleotide
gccgggccguggacuggug

SEQ ID NO: 3590 - RNA, 19 nt, Artificial Sequence
  Description of Artificial Sequence: Synthetic oligonucleotide
gccugugcuuugugaugga

SEQ ID NO: 3591 - RNA, 19 nt, Artificial Sequence
  Description of Artificial Sequence: Synthetic oligonucleotide
gcugaugaagaccgagagg

SEQ ID NO: 3592 - RNA, 19 nt, Artificial Sequence
  Description of Artificial Sequence: Synthetic oligonucleotide
gcuuugugauggaguaugc

SEQ ID NO: 3593 - RNA, 19 nt, Artificial Sequence
  Description of Artificial Sequence: Synthetic oligonucleotide
ggacaaugacuauggccgg

SEQ ID NO: 3594 - RNA, 19 nt, Artificial Sequence
  Description of Artificial Sequence: Synthetic oligonucleotide
ggaguaugccaacgggggu

SEQ ID NO: 3595 - RNA, 19 nt, Artificial Sequence
  Description of Artificial Sequence: Synthetic oligonucleotide
ggcacccguuccucacugc

SEQ ID NO: 3596 - RNA, 19 nt, Artificial Sequence
  Description of Artificial Sequence: Synthetic oligonucleotide
ggcuccuucauuggguaca

SEQ ID NO: 3597 - RNA, 19 nt, Artificial Sequence
  Description of Artificial Sequence: Synthetic oligonucleotide
ggccacgguacuuccugcu

SEQ ID NO: 3598 - RNA, 19 nt, Artificial Sequence
  Description of Artificial Sequence: Synthetic oligonucleotide
ggcgccugaggugcuggag

SEQ ID NO: 3599 - RNA, 19 nt, Artificial Sequence
  Description of Artificial Sequence: Synthetic oligonucleotide
ggccgggccguggacuggu

SEQ ID NO: 3600 - RNA, 19 nt, Artificial Sequence
  Description of Artificial Sequence: Synthetic oligonucleotide
ggaggccacgguacuuccu

SEQ ID NO: 3601 - RNA, 19 nt, Artificial Sequence
  Description of Artificial Sequence: Synthetic oligonucleotide
guaugccaacgggggugag

SEQ ID NO: 3602 - RNA, 19 nt, Artificial Sequence
  Description of Artificial Sequence: Synthetic oligonucleotide
gugauggaguaugccaacg

SEQ ID NO: 3603 - RNA, 19 nt, Artificial Sequence
  Description of Artificial Sequence: Synthetic oligonucleotide
guccuccagaacaccaggc

SEQ ID NO: 3604 - RNA, 19 nt, Artificial Sequence
  Description of Artificial Sequence: Synthetic oligonucleotide
gggccguggacuggugggg

SEQ ID NO: 3605 - RNA, 19 nt, Artificial Sequence
  Description of Artificial Sequence: Synthetic oligonucleotide
guggaccacagucaucgag

SEQ ID NO: 3606 - RNA, 19 nt, Artificial Sequence
  Description of Artificial Sequence: Synthetic oligonucleotide
gugggggugggcaucucug

SEQ ID NO: 3607 - RNA, 19 nt, Artificial Sequence
  Description of Artificial Sequence: Synthetic oligonucleotide
uaccgcgacaucaagcugg

SEQ ID NO: 3608 - RNA, 19 nt, Artificial Sequence
  Description of Artificial Sequence: Synthetic oligonucleotide
uaccuggcgccugaggugc

SEQ ID NO: 3609 - RNA, 19 nt, Artificial Sequence
  Description of Artificial Sequence: Synthetic oligonucleotide
uaugccaacgggggugagc

SEQ ID NO: 3610 - RNA, 19 nt, Artificial Sequence
  Description of Artificial Sequence: Synthetic oligonucleotide
uacgccaugaagauccugc

SEQ ID NO: 3611 - RNA, 19 nt, Artificial Sequence
  Description of Artificial Sequence: Synthetic oligonucleotide
uaaaaauaaaaaaaaaaaa

SEQ ID NO: 3612 - RNA, 19 nt, Artificial Sequence
  Description of Artificial Sequence: Synthetic oligonucleotide
ucuaaaaauaaaaaaaaaa

SEQ ID NO: 3613 - RNA, 19 nt, Artificial Sequence
  Description of Artificial Sequence: Synthetic oligonucleotide
ucacaaucacacccccuga

SEQ ID NO: 3614 - RNA, 19 nt, Artificial Sequence
  Description of Artificial Sequence: Synthetic oligonucleotide
ucaccgagagccggguccu

SEQ ID NO: 3615 - RNA, 19 nt, Artificial Sequence
  Description of Artificial Sequence: Synthetic oligonucleotide
ugauggaguaugccaacgg

SEQ ID NO: 3616 - RNA, 19 nt, Artificial Sequence
  Description of Artificial Sequence: Synthetic oligonucleotide
ucauuggguacaaggagag

SEQ ID NO: 3617 - RNA, 19 nt, Artificial Sequence
  Description of Artificial Sequence: Synthetic oligonucleotide
accaggcacccguuccuca

SEQ ID NO: 3618 - RNA, 19 nt, Artificial Sequence
  Description of Artificial Sequence: Synthetic oligonucleotide
ucccgggagcgugucuuca

SEQ ID NO: 3619 - RNA, 19 nt, Artificial Sequence
  Description of Artificial Sequence: Synthetic oligonucleotide
uccucacugcgcugaagua

SEQ ID NO: 3620 - RNA, 19 nt, Artificial Sequence
  Description of Artificial Sequence: Synthetic oligonucleotide
uccuccagaacaccaggca

SEQ ID NO: 3621 - RNA, 19 nt, Artificial Sequence
  Description of Artificial Sequence: Synthetic oligonucleotide
uccuggugcgggagaaggc

SEQ ID NO: 3622 - RNA, 19 nt, Artificial Sequence
  Description of Artificial Sequence: Synthetic oligonucleotide
ugaugaagaccgagaggcc

SEQ ID NO: 3623 - RNA, 19 nt, Artificial Sequence
  Description of Artificial Sequence: Synthetic oligonucleotide
uccagaacaccaggcaccc

SEQ ID NO: 3624 - RNA, 19 nt, Artificial Sequence
  Description of Artificial Sequence: Synthetic oligonucleotide
ggccguggacugguggggg

SEQ ID NO: 3625 - RNA, 19 nt, Artificial Sequence
  Description of Artificial Sequence: Synthetic oligonucleotide
uggcgccugaggugcugga

SEQ ID NO: 3626 - RNA, 19 nt, Artificial Sequence
  Description of Artificial Sequence: Synthetic oligonucleotide
uggaggccacgguacuucc

SEQ ID NO: 3627 - RNA, 19 nt, Artificial Sequence
  Description of Artificial Sequence: Synthetic oligonucleotide
ugggggugggcaucucugg

SEQ ID NO: 3628 - RNA, 19 nt, Artificial Sequence
  Description of Artificial Sequence: Synthetic oligonucleotide
uggugcgggagaaggccac

SEQ ID NO: 3629 - RNA, 19 nt, Artificial Sequence
  Description of Artificial Sequence: Synthetic oligonucleotide
ugugauggaguaugccaac

SEQ ID NO: 3630 - RNA, 19 nt, Artificial Sequence
  Description of Artificial Sequence: Synthetic oligonucleotide
uucauuggguacaaggaga

SEQ ID NO: 3631 - RNA, 19 nt, Artificial Sequence
  Description of Artificial Sequence: Synthetic oligonucleotide
uuccucacugcgcugaagu

SEQ ID NO: 3632 - RNA, 19 nt, Artificial Sequence
  Description of Artificial Sequence: Synthetic oligonucleotide
uuggguacaaggagaggcc

SEQ ID NO: 3633 - RNA, 19 nt, Artificial Sequence
  Description of Artificial Sequence: Synthetic oligonucleotide
uugugauggaguaugccaa

SEQ ID NO: 3634 - RNA, 19 nt, Artificial Sequence
  Description of Artificial Sequence: Synthetic oligonucleotide
uuugugauggaguaugcca

SEQ ID NO: 3635 - RNA, 19 nt, Artificial Sequence
  Description of Artificial Sequence: Synthetic oligonucleotide
aaagauggccacaucaaga

SEQ ID NO: 3636 - RNA, 19 nt, Artificial Sequence
  Description of Artificial Sequence: Synthetic oligonucleotide
aagauggccacaucaagau

SEQ ID NO: 3637 - RNA, 19 nt, Artificial Sequence
  Description of Artificial Sequence: Synthetic oligonucleotide
aaggaugaagucgcucaca

SEQ ID NO: 3638 - RNA, 19 nt, Artificial Sequence
  Description of Artificial Sequence: Synthetic oligonucleotide
aaugacuauggccgggccg

SEQ ID NO: 3639 - RNA, 19 nt, Artificial Sequence
  Description of Artificial Sequence: Synthetic oligonucleotide
aggaugaagucgcucacac

SEQ ID NO: 3640 - RNA, 19 nt, Artificial Sequence
  Description of Artificial Sequence: Synthetic oligonucleotide
augacuauggccgggccgu

SEQ ID NO: 3641 - RNA, 19 nt, Artificial Sequence
  Description of Artificial Sequence: Synthetic oligonucleotide
auugccaaggaugaagucg

SEQ ID NO: 3642 - RNA, 19 nt, Artificial Sequence
  Description of Artificial Sequence: Synthetic oligonucleotide
caaagauggccacaucaag

SEQ ID NO: 3643 - RNA, 19 nt, Artificial Sequence
  Description of Artificial Sequence: Synthetic oligonucleotide
ggugcagagauugucucgg

SEQ ID NO: 3644 - RNA, 19 nt, Artificial Sequence
  Description of Artificial Sequence: Synthetic oligonucleotide
gugcagagauugucucggc

SEQ ID NO: 3645 - RNA, 19 nt, Artificial Sequence
  Description of Artificial Sequence: Synthetic oligonucleotide
ugaaguaugccuuccagac

SEQ ID NO: 3646 - RNA, 19 nt, Artificial Sequence
  Description of Artificial Sequence: Synthetic oligonucleotide
uuauggugcagagauuguc

SEQ ID NO: 3647 - RNA, 19 nt, Artificial Sequence
  Description of Artificial Sequence: Synthetic oligonucleotide
uugccaaggaugaagucgc

SEQ ID NO: 3648 - RNA, 19 nt, Artificial Sequence
  Description of Artificial Sequence: Synthetic oligonucleotide
uuuauggugcagagauugu

SEQ ID NO: 3649 - RNA, 19 nt, Artificial Sequence
  Description of Artificial Sequence: Synthetic oligonucleotide
uuuuauggugcagagauug

SEQ ID NO: 3650 - RNA, 19 nt, Artificial Sequence
  Description of Artificial Sequence: Synthetic oligonucleotide
aaugggggcgagcuguuuu

SEQ ID NO: 3651 - RNA, 19 nt, Artificial Sequence
  Description of Artificial Sequence: Synthetic oligonucleotide
augggggcgagcuguuuuu

SEQ ID NO: 3652 - RNA, 19 nt, Artificial Sequence
  Description of Artificial Sequence: Synthetic oligonucleotide
agaaucuaaugcuggacaa

SEQ ID NO: 3653 - RNA, 19 nt, Artificial Sequence
  Description of Artificial Sequence: Synthetic oligonucleotide
agcggguguucucugagga

SEQ ID NO: 3654 - RNA, 19 nt, Artificial Sequence
  Description of Artificial Sequence: Synthetic oligonucleotide
ccccucaacaacuuuucag

SEQ ID NO: 3655 - RNA, 19 nt, Artificial Sequence
  Description of Artificial Sequence: Synthetic oligonucleotide
cccucaacaacuuuucagu

SEQ ID NO: 3656 - RNA, 19 nt, Artificial Sequence
  Description of Artificial Sequence: Synthetic oligonucleotide
ccucaacaacuuuucagug

SEQ ID NO: 3657 - RNA, 19 nt, Artificial Sequence
  Description of Artificial Sequence: Synthetic oligonucleotide
ugggggcgagcuguuuuuc

SEQ ID NO: 3658 - RNA, 19 nt, Artificial Sequence
  Description of Artificial Sequence: Synthetic oligonucleotide
cggguguucucugaggacc

SEQ ID NO: 3659 - RNA, 19 nt, Artificial Sequence
  Description of Artificial Sequence: Synthetic oligonucleotide
cucaacaacuuuucagugg

SEQ ID NO: 3660 - RNA, 19 nt, Artificial Sequence
  Description of Artificial Sequence: Synthetic oligonucleotide
auccccucaacaacuuuuc

SEQ ID NO: 3661 - RNA, 19 nt, Artificial Sequence
  Description of Artificial Sequence: Synthetic oligonucleotide
gagaaucuaaugcuggaca

SEQ ID NO: 3662 - RNA, 19 nt, Artificial Sequence
  Description of Artificial Sequence: Synthetic oligonucleotide
gagcggguguucucugagg

SEQ ID NO: 3663 - RNA, 19 nt, Artificial Sequence
  Description of Artificial Sequence: Synthetic oligonucleotide
gcggguguucucugaggac

SEQ ID NO: 3664 - RNA, 19 nt, Artificial Sequence
  Description of Artificial Sequence: Synthetic oligonucleotide
ggagaaucuaaugcuggac

SEQ ID NO: 3665 - RNA, 19 nt, Artificial Sequence
  Description of Artificial Sequence: Synthetic oligonucleotide
gggcgagcuguuuuuccau

SEQ ID NO: 3666 - RNA, 19 nt, Artificial Sequence
  Description of Artificial Sequence: Synthetic oligonucleotide
ggguguucucugaggaccg

SEQ ID NO: 3667 - RNA, 19 nt, Artificial Sequence
  Description of Artificial Sequence: Synthetic oligonucleotide
ucaacaacuuuucaguggc

SEQ ID NO: 3668 - RNA, 19 nt, Artificial Sequence
  Description of Artificial Sequence: Synthetic oligonucleotide
uccccucaacaacuuuuca

SEQ ID NO: 3669 - RNA, 19 nt, Artificial Sequence
  Description of Artificial Sequence: Synthetic oligonucleotide
uggagaaucuaaugcugga

SEQ ID NO: 3670 - RNA, 19 nt, Artificial Sequence
  Description of Artificial Sequence: Synthetic oligonucleotide
aaucuaaugcuggacaaag

SEQ ID NO: 3671 - RNA, 19 nt, Artificial Sequence
  Description of Artificial Sequence: Synthetic oligonucleotide
aaggaugaaguggcacaca

SEQ ID NO: 3672 - RNA, 19 nt, Artificial Sequence
  Description of Artificial Sequence: Synthetic oligonucleotide
aagucauuauugcaaagga

SEQ ID NO: 3673 - RNA, 19 nt, Artificial Sequence
  Description of Artificial Sequence: Synthetic oligonucleotide
accaugaagacauucugug

SEQ ID NO: 3674 - RNA, 19 nt, Artificial Sequence
  Description of Artificial Sequence: Synthetic oligonucleotide
aucuaaugcuggacaaaga

SEQ ID NO: 3675 - RNA, 19 nt, Artificial Sequence
  Description of Artificial Sequence: Synthetic oligonucleotide
aggaugaaguggcacacac

SEQ ID NO: 3676 - RNA, 19 nt, Artificial Sequence
  Description of Artificial Sequence: Synthetic oligonucleotide
agucauuauugcaaaggau

SEQ ID NO: 3677 - RNA, 19 nt, Artificial Sequence
  Description of Artificial Sequence: Synthetic oligonucleotide
auugcaaaggaugaagugg

SEQ ID NO: 3678 - RNA, 19 nt, Artificial Sequence
  Description of Artificial Sequence: Synthetic oligonucleotide
caccaugaagacauucugu

SEQ ID NO: 3679 - RNA, 19 nt, Artificial Sequence
  Description of Artificial Sequence: Synthetic oligonucleotide
cauuauugcaaaggaugaa

SEQ ID NO: 3680 - RNA, 19 nt, Artificial Sequence
  Description of Artificial Sequence: Synthetic oligonucleotide
ccaugaagacauucugugg

SEQ ID NO: 3681 - RNA, 19 nt, Artificial Sequence
  Description of Artificial Sequence: Synthetic oligonucleotide
ucuaaugcuggacaaagau

SEQ ID NO: 3682 - RNA, 19 nt, Artificial Sequence
  Description of Artificial Sequence: Synthetic oligonucleotide
gaagucauuauugcaaagg

SEQ ID NO: 3683 - RNA, 19 nt, Artificial Sequence
  Description of Artificial Sequence: Synthetic oligonucleotide
gucauuauugcaaaggaug

SEQ ID NO: 3684 - RNA, 19 nt, Artificial Sequence
  Description of Artificial Sequence: Synthetic oligonucleotide
ucauuauugcaaaggauga

SEQ ID NO: 3685 - RNA, 19 nt, Artificial Sequence
  Description of Artificial Sequence: Synthetic oligonucleotide
uuauugcaaaggaugaagu

SEQ ID NO: 3686 - RNA, 19 nt, Artificial Sequence
  Description of Artificial Sequence: Synthetic oligonucleotide
uugcaaaggaugaaguggc

SEQ ID NO: 3687 - RNA, 19 nt, Artificial Sequence
  Description of Artificial Sequence: Synthetic oligonucleotide
acgcucagccccgaggcca

SEQ ID NO: 3688 - RNA, 19 nt, Artificial Sequence
  Description of Artificial Sequence: Synthetic oligonucleotide
cacgcucagccccgaggcc

SEQ ID NO: 3689 - RNA, 19 nt, Artificial Sequence
  Description of Artificial Sequence: Synthetic oligonucleotide
ccgcgcacgcucagccccg

SEQ ID NO: 3690 - RNA, 19 nt, Artificial Sequence
  Description of Artificial Sequence: Synthetic oligonucleotide
cgcacgcucagccccgagg

SEQ ID NO: 3691 - RNA, 19 nt, Artificial Sequence
  Description of Artificial Sequence: Synthetic oligonucleotide
cgcgcacgcucagccccga

SEQ ID NO: 3692 - RNA, 19 nt, Artificial Sequence
  Description of Artificial Sequence: Synthetic oligonucleotide
cgcucagccccgaggccaa

SEQ ID NO: 3693 - RNA, 19 nt, Artificial Sequence
  Description of Artificial Sequence: Synthetic oligonucleotide
cuucccgcgcacgcucagc

SEQ ID NO: 3694 - RNA, 19 nt, Artificial Sequence
  Description of Artificial Sequence: Synthetic oligonucleotide
cucagccccgaggccaagu

SEQ ID NO: 3695 - RNA, 19 nt, Artificial Sequence
  Description of Artificial Sequence: Synthetic oligonucleotide
gcacgcucagccccgaggc

SEQ ID NO: 3696 - RNA, 19 nt, Artificial Sequence
  Description of Artificial Sequence: Synthetic oligonucleotide
gcgcacgcucagccccgag

SEQ ID NO: 3697 - RNA, 19 nt, Artificial Sequence
  Description of Artificial Sequence: Synthetic oligonucleotide
gcucagccccgaggccaag

SEQ ID NO: 3698 - RNA, 19 nt, Artificial Sequence
  Description of Artificial Sequence: Synthetic oligonucleotide
agccccgaggccaaguccc

SEQ ID NO: 3699 - RNA, 19 nt, Artificial Sequence
  Description of Artificial Sequence: Synthetic oligonucleotide
ucccgcgcacgcucagccc

SEQ ID NO: 3700 - RNA, 19 nt, Artificial Sequence
  Description of Artificial Sequence: Synthetic oligonucleotide
cagccccgaggccaagucc

SEQ ID NO: 3701 - RNA, 19 nt, Artificial Sequence
  Description of Artificial Sequence: Synthetic oligonucleotide
uucccgcgcacgcucagcc

SEQ ID NO: 3702 - RNA, 19 nt, Artificial Sequence
  Description of Artificial Sequence: Synthetic oligonucleotide
ucagccccgaggccaaguc

SEQ ID NO: 3703 - RNA, 19 nt, Artificial Sequence
  Description of Artificial Sequence: Synthetic oligonucleotide
augaaugacuucgacuauc

SEQ ID NO: 3704 - RNA, 19 nt, Artificial Sequence
  Description of Artificial Sequence: Synthetic oligonucleotide
ugaaugacuucgacuaucu

SEQ ID NO: 3705 - RNA, 19 nt, Artificial Sequence
  Description of Artificial Sequence: Synthetic oligonucleotide
agauauuuugaugaagaau

SEQ ID NO: 3706 - RNA, 19 nt, Artificial Sequence
  Description of Artificial Sequence: Synthetic oligonucleotide
ccauugugaaagaagguug

SEQ ID NO: 3707 - RNA, 19 nt, Artificial Sequence
  Description of Artificial Sequence: Synthetic oligonucleotide
gauauuuugaugaagaauu

SEQ ID NO: 3708 - RNA, 19 nt, Artificial Sequence
  Description of Artificial Sequence: Synthetic oligonucleotide
cauugugaaagaagguugg

SEQ ID NO: 3709 - RNA, 19 nt, Artificial Sequence
  Description of Artificial Sequence: Synthetic oligonucleotide
aacaccuucaucauccgcu

SEQ ID NO: 3710 - RNA, 19 nt, Artificial Sequence
  Description of Artificial Sequence: Synthetic oligonucleotide
acaccuucaucauccgcug

SEQ ID NO: 3711 - RNA, 19 nt, Artificial Sequence
  Description of Artificial Sequence: Synthetic oligonucleotide
accuucaucauccgcugcc

SEQ ID NO: 3712 - RNA, 19 nt, Artificial Sequence
  Description of Artificial Sequence: Synthetic oligonucleotide
caacaccuucaucauccgc

SEQ ID NO: 3713 - RNA, 19 nt, Artificial Sequence
  Description of Artificial Sequence: Synthetic oligonucleotide
caccuucaucauccgcugc

SEQ ID NO: 3714 - RNA, 19 nt, Artificial Sequence
  Description of Artificial Sequence: Synthetic oligonucleotide
ccaacaccuucaucauccg

SEQ ID NO: 3715 - RNA, 19 nt, Artificial Sequence
  Description of Artificial Sequence: Synthetic oligonucleotide
cccaacaccuucaucaucc

SEQ ID NO: 3716 - RNA, 19 nt, Artificial Sequence
  Description of Artificial Sequence: Synthetic oligonucleotide
cccacacacucaccgagaa

SEQ ID NO: 3717 - RNA, 19 nt, Artificial Sequence
  Description of Artificial Sequence: Synthetic oligonucleotide
ccccaggucacgucggaga

SEQ ID NO: 3718 - RNA, 19 nt, Artificial Sequence
  Description of Artificial Sequence: Synthetic oligonucleotide
ccuucaucauccgcugccu

SEQ ID NO: 3719 - RNA, 19 nt, Artificial Sequence
  Description of Artificial Sequence: Synthetic oligonucleotide
cgccaaggagaucaugcag

SEQ ID NO: 3720 - RNA, 19 nt, Artificial Sequence
  Description of Artificial Sequence: Synthetic oligonucleotide
cggcccaacaccuucauca

SEQ ID NO: 3721 - RNA, 19 nt, Artificial Sequence
  Description of Artificial Sequence: Synthetic oligonucleotide
cgggcccgcuucuauggcg

SEQ ID NO: 3722 - RNA, 19 nt, Artificial Sequence
  Description of Artificial Sequence: Synthetic oligonucleotide
cuucaucauccgcugccug

SEQ ID NO: 3723 - RNA, 19 nt, Artificial Sequence
  Description of Artificial Sequence: Synthetic oligonucleotide
gacgccaaggagaucaugc

SEQ ID NO: 3724 - RNA, 19 nt, Artificial Sequence
  Description of Artificial Sequence: Synthetic oligonucleotide
ggcccaacaccuucaucau

SEQ ID NO: 3725 - RNA, 19 nt, Artificial Sequence
  Description of Artificial Sequence: Synthetic oligonucleotide
gggcccgcuucuauggcgc

SEQ ID NO: 3726 - RNA, 19 nt, Artificial Sequence
  Description of Artificial Sequence: Synthetic oligonucleotide
ucaucauccgcugccugca

SEQ ID NO: 3727 - RNA, 19 nt, Artificial Sequence
  Description of Artificial Sequence: Synthetic oligonucleotide
ucuauggcgcugagauugu

SEQ ID NO: 3728 - RNA, 19 nt, Artificial Sequence
  Description of Artificial Sequence: Synthetic oligonucleotide
uucaucauccgcugccugc

SEQ ID NO: 3729 - RNA, 19 nt, Artificial Sequence
  Description of Artificial Sequence: Synthetic oligonucleotide
uucuauggcgcugagauug

SEQ ID NO: 3730 - RNA, 19 nt, Artificial Sequence
  Description of Artificial Sequence: Synthetic oligonucleotide
caaugacuacggccgugca

SEQ ID NO: 3731 - RNA, 19 nt, Artificial Sequence
  Description of Artificial Sequence: Synthetic oligonucleotide
ccaugaagauccucaagaa

SEQ ID NO: 3732 - RNA, 19 nt, Artificial Sequence
  Description of Artificial Sequence: Synthetic oligonucleotide
ccgggaccucaagcuggag

SEQ ID NO: 3733 - RNA, 19 nt, Artificial Sequence
  Description of Artificial Sequence: Synthetic oligonucleotide
cgggaccucaagcuggaga

SEQ ID NO: 3734 - RNA, 19 nt, Artificial Sequence
  Description of Artificial Sequence: Synthetic oligonucleotide
gacaccagguauuuugaug

SEQ ID NO: 3735 - RNA, 19 nt, Artificial Sequence
  Description of Artificial Sequence: Synthetic oligonucleotide
gccaugaagauccucaaga

SEQ ID NO: 3736 - RNA, 19 nt, Artificial Sequence
  Description of Artificial Sequence: Synthetic oligonucleotide
gggaccucaagcuggagaa

SEQ ID NO: 3737 - RNA, 19 nt, Artificial Sequence
  Description of Artificial Sequence: Synthetic oligonucleotide
guguaccgggaccucaagc

SEQ ID NO: 3738 - RNA, 19 nt, Artificial Sequence
  Description of Artificial Sequence: Synthetic oligonucleotide
uguaccgggaccucaagcu

SEQ ID NO: 3739 - RNA, 19 nt, Artificial Sequence
  Description of Artificial Sequence: Synthetic oligonucleotide
acacaagguacuucgauga

SEQ ID NO: 3740 - RNA, 19 nt, Artificial Sequence
  Description of Artificial Sequence: Synthetic oligonucleotide
ccugcccacgccuccccuc

SEQ ID NO: 3741 - RNA, 19 nt, Artificial Sequence
  Description of Artificial Sequence: Synthetic oligonucleotide
cagaaugccagcugaugaa

SEQ ID NO: 3742 - RNA, 19 nt, Artificial Sequence
  Description of Artificial Sequence: Synthetic oligonucleotide
gacacaagguacuucgaug

SEQ ID NO: 3743 - RNA, 19 nt, Artificial Sequence
  Description of Artificial Sequence: Synthetic oligonucleotide
agaaugccagcugaugaag

SEQ ID NO: 3744 - RNA, 19 nt, Artificial Sequence
  Description of Artificial Sequence: Synthetic oligonucleotide
gcagaaugccagcugauga

SEQ ID NO: 3745 - RNA, 19 nt, Artificial Sequence
  Description of Artificial Sequence: Synthetic oligonucleotide
gacugaggagauggaagug

SEQ ID NO: 3746 - RNA, 19 nt, Artificial Sequence
  Description of Artificial Sequence: Synthetic oligonucleotide
uaaacaacuucuccguagc

SEQ ID NO: 3747 - RNA, 19 nt, Artificial Sequence
  Description of Artificial Sequence: Synthetic oligonucleotide
ggccaccaugaaaaccuuc

SEQ ID NO: 3748 - RNA, 19 nt, Artificial Sequence
  Description of Artificial Sequence: Synthetic oligonucleotide
accaugaaugacuucgacu

SEQ ID NO: 3749 - RNA, 19 nt, Artificial Sequence
  Description of Artificial Sequence: Synthetic oligonucleotide
acuucgaugaugaauuuac

SEQ ID NO: 3750 - RNA, 19 nt, Artificial Sequence
  Description of Artificial Sequence: Synthetic oligonucleotide
acuuuggccucugcaaaga

SEQ ID NO: 3751 - RNA, 19 nt, Artificial Sequence
  Description of Artificial Sequence: Synthetic oligonucleotide
caugaaugacuucgacuau

SEQ ID NO: 3752 - RNA, 19 nt, Artificial Sequence
  Description of Artificial Sequence: Synthetic oligonucleotide
ccaugaaugacuucgacua

SEQ ID NO: 3753 - RNA, 19 nt, Artificial Sequence
  Description of Artificial Sequence: Synthetic oligonucleotide
gacuuuggccucugcaaag

SEQ ID NO: 3754 - RNA, 19 nt, Artificial Sequence
  Description of Artificial Sequence: Synthetic oligonucleotide
uacuucgaugaugaauuua

SEQ ID NO: 3755 - RNA, 19 nt, Artificial Sequence
  Description of Artificial Sequence: Synthetic oligonucleotide
acuagauauuuugaugaag

SEQ ID NO: 3756 - RNA, 19 nt, Artificial Sequence
  Description of Artificial Sequence: Synthetic oligonucleotide
aguagacugguggggccua

SEQ ID NO: 3757 - RNA, 19 nt, Artificial Sequence
  Description of Artificial Sequence: Synthetic oligonucleotide
augagaaacuuuuugaauu

SEQ ID NO: 3758 - RNA, 19 nt, Artificial Sequence
  Description of Artificial Sequence: Synthetic oligonucleotide
auugugaaagaagguuggg

SEQ ID NO: 3759 - RNA, 19 nt, Artificial Sequence
  Description of Artificial Sequence: Synthetic oligonucleotide
auuuugaugaagaauuuac

SEQ ID NO: 3760 - RNA, 19 nt, Artificial Sequence
  Description of Artificial Sequence: Synthetic oligonucleotide
caugagaaacuuuuugaau

SEQ ID NO: 3761 - RNA, 19 nt, Artificial Sequence
  Description of Artificial Sequence: Synthetic oligonucleotide
cuagauauuuugaugaaga

SEQ ID NO: 3762 - RNA, 19 nt, Artificial Sequence
  Description of Artificial Sequence: Synthetic oligonucleotide
guagacugguggggccuag

SEQ ID NO: 3763 - RNA, 19 nt, Artificial Sequence
  Description of Artificial Sequence: Synthetic oligonucleotide
uauuuugaugaagaauuua

SEQ ID NO: 3764 - RNA, 19 nt, Artificial Sequence
  Description of Artificial Sequence: Synthetic oligonucleotide
uagacugguggggccuagg

SEQ ID NO: 3765 - RNA, 19 nt, Artificial Sequence
  Description of Artificial Sequence: Synthetic oligonucleotide
uugugaaagaagguugggu

SEQ ID NO: 3766 - RNA, 19 nt, Artificial Sequence
  Description of Artificial Sequence: Synthetic oligonucleotide
aaugccaguuaaugaaaac

SEQ ID NO: 3767 - RNA, 19 nt, Artificial Sequence
  Description of Artificial Sequence: Synthetic oligonucleotide
acuauggccgagcaguaga

SEQ ID NO: 3768 - RNA, 19 nt, Artificial Sequence
  Description of Artificial Sequence: Synthetic oligonucleotide
auggccgagcaguagacug

SEQ ID NO: 3769 - RNA, 19 nt, Artificial Sequence
  Description of Artificial Sequence: Synthetic oligonucleotide
caaaaugccaguuaaugaa

SEQ ID NO: 3770 - RNA, 19 nt, Artificial Sequence
  Description of Artificial Sequence: Synthetic oligonucleotide
cguuucuauggugcagaaa

SEQ ID NO: 3771 - RNA, 19 nt, Artificial Sequence
  Description of Artificial Sequence: Synthetic oligonucleotide
cuauggccgagcaguagac

SEQ ID NO: 3772 - RNA, 19 nt, Artificial Sequence
  Description of Artificial Sequence: Synthetic oligonucleotide
cuccagaggaaagggaaga

SEQ ID NO: 3773 - RNA, 19 nt, Artificial Sequence
  Description of Artificial Sequence: Synthetic oligonucleotide
gcaaaaugccaguuaauga

SEQ ID NO: 3774 - RNA, 19 nt, Artificial Sequence
  Description of Artificial Sequence: Synthetic oligonucleotide
agaaagaagucauuauugc

SEQ ID NO: 3775 - RNA, 19 nt, Artificial Sequence
  Description of Artificial Sequence: Synthetic oligonucleotide
agauaaugacuauggccga

SEQ ID NO: 3776 - RNA, 19 nt, Artificial Sequence
  Description of Artificial Sequence: Synthetic oligonucleotide
agaagauaaugacuauggc

SEQ ID NO: 3777 - RNA, 19 nt, Artificial Sequence
  Description of Artificial Sequence: Synthetic oligonucleotide
guuucuauggugcagaaau

SEQ ID NO: 3778 - RNA, 19 nt, Artificial Sequence
  Description of Artificial Sequence: Synthetic oligonucleotide
uuucuauggugcagaaauu

SEQ ID NO: 3779 - RNA, 19 nt, Artificial Sequence
  Description of Artificial Sequence: Synthetic oligonucleotide
uauggccgagcaguagacu

SEQ ID NO: 3780 - RNA, 19 nt, Artificial Sequence
  Description of Artificial Sequence: Synthetic oligonucleotide
ugacuauggccgagcagua

SEQ ID NO: 3781 - RNA, 19 nt, Artificial Sequence
  Description of Artificial Sequence: Synthetic oligonucleotide
ugcagaaauugucucugcc

SEQ ID NO: 3782 - RNA, 19 nt, Artificial Sequence
  Description of Artificial Sequence: Synthetic oligonucleotide
uagaagauaaugacuaugg

SEQ ID NO: 3783 - RNA, 19 nt, Artificial Sequence
  Description of Artificial Sequence: Synthetic oligonucleotide
uggccgagcaguagacugg

SEQ ID NO: 3784 - RNA, 19 nt, Artificial Sequence
  Description of Artificial Sequence: Synthetic oligonucleotide
aagaucacagacuucgggc

SEQ ID NO: 3785 - RNA, 19 nt, Artificial Sequence
  Description of Artificial Sequence: Synthetic oligonucleotide
aagauccucaagaaggaag

SEQ ID NO: 3786 - RNA, 19 nt, Artificial Sequence
  Description of Artificial Sequence: Synthetic oligonucleotide
aagccccaggucacgucgg

SEQ ID NO: 3787 - RNA, 19 nt, Artificial Sequence
  Description of Artificial Sequence: Synthetic oligonucleotide
aaggacggugccaccauga

SEQ ID NO: 3788 - RNA, 19 nt, Artificial Sequence
  Description of Artificial Sequence: Synthetic oligonucleotide
aaggagaaggccacaggcc

SEQ ID NO: 3789 - RNA, 19 nt, Artificial Sequence
  Description of Artificial Sequence: Synthetic oligonucleotide
aaguacucuuuccagaccc

SEQ ID NO: 3790 - RNA, 19 nt, Artificial Sequence
  Description of Artificial Sequence: Synthetic oligonucleotide
acacucaccgagaaccgcg

SEQ ID NO: 3791 - RNA, 19 nt, Artificial Sequence
  Description of Artificial Sequence: Synthetic oligonucleotide
accaugaagaccuuuugcg

SEQ ID NO: 3792 - RNA, 19 nt, Artificial Sequence
  Description of Artificial Sequence: Synthetic oligonucleotide
accgagaaccgcguccugc

SEQ ID NO: 3793 - RNA, 19 nt, Artificial Sequence
  Description of Artificial Sequence: Synthetic oligonucleotide
acgggcacauuaagaucac

SEQ ID NO: 3794 - RNA, 19 nt, Artificial Sequence
  Description of Artificial Sequence: Synthetic oligonucleotide
acuacggccgugcagugga

SEQ ID NO: 3795 - RNA, 19 nt, Artificial Sequence
  Description of Artificial Sequence: Synthetic oligonucleotide
acucuuuccagacccacga

SEQ ID NO: 3796 - RNA, 19 nt, Artificial Sequence
  Description of Artificial Sequence: Synthetic oligonucleotide
agaaccgcguccugcagaa

SEQ ID NO: 3797 - RNA, 19 nt, Artificial Sequence
  Description of Artificial Sequence: Synthetic oligonucleotide
agaggcuuggcgggggcuc

SEQ ID NO: 3798 - RNA, 19 nt, Artificial Sequence
  Description of Artificial Sequence: Synthetic oligonucleotide
agaucacagacuucgggcu

SEQ ID NO: 3799 - RNA, 19 nt, Artificial Sequence
  Description of Artificial Sequence: Synthetic oligonucleotide
agauccucaagaaggaagu

SEQ ID NO: 3800 - RNA, 19 nt, Artificial Sequence
  Description of Artificial Sequence: Synthetic oligonucleotide
agccccaggucacgucgga

SEQ ID NO: 3801 - RNA, 19 nt, Artificial Sequence
  Description of Artificial Sequence: Synthetic oligonucleotide
aggaccgggcccgcuucua

SEQ ID NO: 3802 - RNA, 19 nt, Artificial Sequence
  Description of Artificial Sequence: Synthetic oligonucleotide
aggacggugccaccaugaa

SEQ ID NO: 3803 - RNA, 19 nt, Artificial Sequence
  Description of Artificial Sequence: Synthetic oligonucleotide
aggagcgggaggaguggac

SEQ ID NO: 3804 - RNA, 19 nt, Artificial Sequence
  Description of Artificial Sequence: Synthetic oligonucleotide
aguacucuuuccagaccca

SEQ ID NO: 3805 - RNA, 19 nt, Artificial Sequence
  Description of Artificial Sequence: Synthetic oligonucleotide
agucaucguggccaaggac

SEQ ID NO: 3806 - RNA, 19 nt, Artificial Sequence
  Description of Artificial Sequence: Synthetic oligonucleotide
aucaaggacggugccacca

SEQ ID NO: 3807 - RNA, 19 nt, Artificial Sequence
  Description of Artificial Sequence: Synthetic oligonucleotide
auccucaagaaggaaguca

SEQ ID NO: 3808 - RNA, 19 nt, Artificial Sequence
  Description of Artificial Sequence: Synthetic oligonucleotide
augaagauccucaagaagg

SEQ ID NO: 3809 - RNA, 19 nt, Artificial Sequence
  Description of Artificial Sequence: Synthetic oligonucleotide
augcuggacaaggacgggc

SEQ ID NO: 3810 - RNA, 19 nt, Artificial Sequence
  Description of Artificial Sequence: Synthetic oligonucleotide
auggcgcugagauuguguc

SEQ ID NO: 3811 - RNA, 19 nt, Artificial Sequence
  Description of Artificial Sequence: Synthetic oligonucleotide
auuaagaucacagacuucg

SEQ ID NO: 3812 - RNA, 19 nt, Artificial Sequence
  Description of Artificial Sequence: Synthetic oligonucleotide
caagccccaggucacgucg

SEQ ID NO: 3813 - RNA, 19 nt, Artificial Sequence
  Description of Artificial Sequence: Synthetic oligonucleotide
caaggacggugccaccaug

SEQ ID NO: 3814 - RNA, 19 nt, Artificial Sequence
  Description of Artificial Sequence: Synthetic oligonucleotide
cacacucaccgagaaccgc

SEQ ID NO: 3815 - RNA, 19 nt, Artificial Sequence
  Description of Artificial Sequence: Synthetic oligonucleotide
caccaugaagaccuuuugc

SEQ ID NO: 3816 - RNA, 19 nt, Artificial Sequence
  Description of Artificial Sequence: Synthetic oligonucleotide
caccgagaaccgcguccug

SEQ ID NO: 3817 - RNA, 19 nt, Artificial Sequence
  Description of Artificial Sequence: Synthetic oligonucleotide
cacucaccgagaaccgcgu

SEQ ID NO: 3818 - RNA, 19 nt, Artificial Sequence
  Description of Artificial Sequence: Synthetic oligonucleotide
cagaggcuuggcgggggcu

SEQ ID NO: 3819 - RNA, 19 nt, Artificial Sequence
  Description of Artificial Sequence: Synthetic oligonucleotide
caugcuggacaaggacggg

SEQ ID NO: 3820 - RNA, 19 nt, Artificial Sequence
  Description of Artificial Sequence: Synthetic oligonucleotide
cauuaagaucacagacuuc

SEQ ID NO: 3821 - RNA, 19 nt, Artificial Sequence
  Description of Artificial Sequence: Synthetic oligonucleotide
ccaucacaccaccugacca

SEQ ID NO: 3822 - RNA, 19 nt, Artificial Sequence
  Description of Artificial Sequence: Synthetic oligonucleotide
ccaugaagaccuuuugcgg

SEQ ID NO: 3823 - RNA, 19 nt, Artificial Sequence
  Description of Artificial Sequence: Synthetic oligonucleotide
cccacccuucaagccccag

SEQ ID NO: 3824 - RNA, 19 nt, Artificial Sequence
  Description of Artificial Sequence: Synthetic oligonucleotide
ccgagaaccgcguccugca

SEQ ID NO: 3825 - RNA, 19 nt, Artificial Sequence
  Description of Artificial Sequence: Synthetic oligonucleotide
ccucaagaaggaagucauc

SEQ ID NO: 3826 - RNA, 19 nt, Artificial Sequence
  Description of Artificial Sequence: Synthetic oligonucleotide
ccucacagcccugaaguac

SEQ ID NO: 3827 - RNA, 19 nt, Artificial Sequence
  Description of Artificial Sequence: Synthetic oligonucleotide
ccugaguaccuggcccccg

SEQ ID NO: 3828 - RNA, 19 nt, Artificial Sequence
  Description of Artificial Sequence: Synthetic oligonucleotide
cgagaaccgcguccugcag

SEQ ID NO: 3829 - RNA, 19 nt, Artificial Sequence
  Description of Artificial Sequence: Synthetic oligonucleotide
cgccaugaagauccucaag

SEQ ID NO: 3830 - RNA, 19 nt, Artificial Sequence
  Description of Artificial Sequence: Synthetic oligonucleotide
cggcaaggugauccuggug

SEQ ID NO: 3831 - RNA, 19 nt, Artificial Sequence
  Description of Artificial Sequence: Synthetic oligonucleotide
cggccgugcaguggacugg

SEQ ID NO: 3832 - RNA, 19 nt, Artificial Sequence
  Description of Artificial Sequence: Synthetic oligonucleotide
cucaccgagaaccgcgucc

SEQ ID NO: 3833 - RNA, 19 nt, Artificial Sequence
  Description of Artificial Sequence: Synthetic oligonucleotide
cucuuuccagacccacgac

SEQ ID NO: 3834 - RNA, 19 nt, Artificial Sequence
  Description of Artificial Sequence: Synthetic oligonucleotide
cugaagagauggagguguc

SEQ ID NO: 3835 - RNA, 19 nt, Artificial Sequence
  Description of Artificial Sequence: Synthetic oligonucleotide
cugaaguacucuuuccaga

SEQ ID NO: 3836 - RNA, 19 nt, Artificial Sequence
  Description of Artificial Sequence: Synthetic oligonucleotide
cugaguaccuggcccccga

SEQ ID NO: 3837 - RNA, 19 nt, Artificial Sequence
  Description of Artificial Sequence: Synthetic oligonucleotide
cuggacaaggacgggcaca

SEQ ID NO: 3838 - RNA, 19 nt, Artificial Sequence
  Description of Artificial Sequence: Synthetic oligonucleotide
cuuucagggcugcucaaga

SEQ ID NO: 3839 - RNA, 19 nt, Artificial Sequence
  Description of Artificial Sequence: Synthetic oligonucleotide
gaaccgcguccugcagaac

SEQ ID NO: 3840 - RNA, 19 nt, Artificial Sequence
  Description of Artificial Sequence: Synthetic oligonucleotide
gaacgugguguaccgggac

SEQ ID NO: 3841 - RNA, 19 nt, Artificial Sequence
  Description of Artificial Sequence: Synthetic oligonucleotide
gaagauccucaagaaggaa

SEQ ID NO: 3842 - RNA, 19 nt, Artificial Sequence
  Description of Artificial Sequence: Synthetic oligonucleotide
gaaggagaaggccacaggc

SEQ ID NO: 3843 - RNA, 19 nt, Artificial Sequence
  Description of Artificial Sequence: Synthetic oligonucleotide
gaccgggcccgcuucuaug

SEQ ID NO: 3844 - RNA, 19 nt, Artificial Sequence
  Description of Artificial Sequence: Synthetic oligonucleotide
gacgggcacauuaagauca

SEQ ID NO: 3845 - RNA, 19 nt, Artificial Sequence
  Description of Artificial Sequence: Synthetic oligonucleotide
gacuacggccgugcagugg

SEQ ID NO: 3846 - RNA, 19 nt, Artificial Sequence
  Description of Artificial Sequence: Synthetic oligonucleotide
gagaaccgcguccugcaga

SEQ ID NO: 3847 - RNA, 19 nt, Artificial Sequence
  Description of Artificial Sequence: Synthetic oligonucleotide
gaggaccgggcccgcuucu

SEQ ID NO: 3848 - RNA, 19 nt, Artificial Sequence
  Description of Artificial Sequence: Synthetic oligonucleotide
gaggcuuggcgggggcucc

SEQ ID NO: 3849 - RNA, 19 nt, Artificial Sequence
  Description of Artificial Sequence: Synthetic oligonucleotide
gauccucaagaaggaaguc

SEQ ID NO: 3850 - RNA, 19 nt, Artificial Sequence
  Description of Artificial Sequence: Synthetic oligonucleotide
gauccuggugaaggagaag

SEQ ID NO: 3851 - RNA, 19 nt, Artificial Sequence
  Description of Artificial Sequence: Synthetic oligonucleotide
gcaagggcacuuucggcaa

SEQ ID NO: 3852 - RNA, 19 nt, Artificial Sequence
  Description of Artificial Sequence: Synthetic oligonucleotide
gccccaggucacgucggag

SEQ ID NO: 3853 - RNA, 19 nt, Artificial Sequence
  Description of Artificial Sequence: Synthetic oligonucleotide
gcuggacaaggacgggcac

SEQ ID NO: 3854 - RNA, 19 nt, Artificial Sequence
  Description of Artificial Sequence: Synthetic oligonucleotide
ggcaagggcacuuucggca

SEQ ID NO: 3855 - RNA, 19 nt, Artificial Sequence
  Description of Artificial Sequence: Synthetic oligonucleotide
ggcccacacacucaccgag

SEQ ID NO: 3856 - RNA, 19 nt, Artificial Sequence
  Description of Artificial Sequence: Synthetic oligonucleotide
ggcugaagagauggaggug

SEQ ID NO: 3857 - RNA, 19 nt, Artificial Sequence
  Description of Artificial Sequence: Synthetic oligonucleotide
ggggguggccaucccuggg

SEQ ID NO: 3858 - RNA, 19 nt, Artificial Sequence
  Description of Artificial Sequence: Synthetic oligonucleotide
ggugaaggagaaggccaca

SEQ ID NO: 3859 - RNA, 19 nt, Artificial Sequence
  Description of Artificial Sequence: Synthetic oligonucleotide
guacucuuuccagacccac

SEQ ID NO: 3860 - RNA, 19 nt, Artificial Sequence
  Description of Artificial Sequence: Synthetic oligonucleotide
gucaucgaacgcaccuucc

SEQ ID NO: 3861 - RNA, 19 nt, Artificial Sequence
  Description of Artificial Sequence: Synthetic oligonucleotide
gucaucguggccaaggacg

SEQ ID NO: 3862 - RNA, 19 nt, Artificial Sequence
  Description of Artificial Sequence: Synthetic oligonucleotide
gugaaggagaaggccacag

SEQ ID NO: 3863 - RNA, 19 nt, Artificial Sequence
  Description of Artificial Sequence: Synthetic oligonucleotide
gugaccaugaacgaguuug

SEQ ID NO: 3864 - RNA, 19 nt, Artificial Sequence
  Description of Artificial Sequence: Synthetic oligonucleotide
gugauccuggugaaggaga

SEQ ID NO: 3865 - RNA, 19 nt, Artificial Sequence
  Description of Artificial Sequence: Synthetic oligonucleotide
guggcccacacacucaccg

SEQ ID NO: 3866 - RNA, 19 nt, Artificial Sequence
  Description of Artificial Sequence: Synthetic oligonucleotide
uacggccgugcaguggacu

SEQ ID NO: 3867 - RNA, 19 nt, Artificial Sequence
  Description of Artificial Sequence: Synthetic oligonucleotide
uacucuuuccagacccacg

SEQ ID NO: 3868 - RNA, 19 nt, Artificial Sequence
  Description of Artificial Sequence: Synthetic oligonucleotide
uauggcgcugagauugugu

SEQ ID NO: 3869 - RNA, 19 nt, Artificial Sequence
  Description of Artificial Sequence: Synthetic oligonucleotide
ucaaggacggugccaccau

SEQ ID NO: 3870 - RNA, 19 nt, Artificial Sequence
  Description of Artificial Sequence: Synthetic oligonucleotide
ucagggcugcucaagaagg

SEQ ID NO: 3871 - RNA, 19 nt, Artificial Sequence
  Description of Artificial Sequence: Synthetic oligonucleotide
ucaucgaacgcaccuucca

SEQ ID NO: 3872 - RNA, 19 nt, Artificial Sequence
  Description of Artificial Sequence: Synthetic oligonucleotide
ucaucguggccaaggacga

SEQ ID NO: 3873 - RNA, 19 nt, Artificial Sequence
  Description of Artificial Sequence: Synthetic oligonucleotide
uccucaagaaggaagucau

SEQ ID NO: 3874 - RNA, 19 nt, Artificial Sequence
  Description of Artificial Sequence: Synthetic oligonucleotide
ucggcaaggugauccuggu

SEQ ID NO: 3875 - RNA, 19 nt, Artificial Sequence
  Description of Artificial Sequence: Synthetic oligonucleotide
ugaagauccucaagaagga

SEQ ID NO: 3876 - RNA, 19 nt, Artificial Sequence
  Description of Artificial Sequence: Synthetic oligonucleotide
ugaaggagaaggccacagg

SEQ ID NO: 3877 - RNA, 19 nt, Artificial Sequence
  Description of Artificial Sequence: Synthetic oligonucleotide
ugaaguacucuuuccagac

SEQ ID NO: 3878 - RNA, 19 nt, Artificial Sequence
  Description of Artificial Sequence: Synthetic oligonucleotide
ugaccaugaacgaguuuga

SEQ ID NO: 3879 - RNA, 19 nt, Artificial Sequence
  Description of Artificial Sequence: Synthetic oligonucleotide
ugacuacggccgugcagug

SEQ ID NO: 3880 - RNA, 19 nt, Artificial Sequence
  Description of Artificial Sequence: Synthetic oligonucleotide
ugcuggacaaggacgggca

SEQ ID NO: 3881 - RNA, 19 nt, Artificial Sequence
  Description of Artificial Sequence: Synthetic oligonucleotide
ugcuuucagggcugcucaa

SEQ ID NO: 3882 - RNA, 19 nt, Artificial Sequence
  Description of Artificial Sequence: Synthetic oligonucleotide
uggacaaggacgggcacau

SEQ ID NO: 3883 - RNA, 19 nt, Artificial Sequence
  Description of Artificial Sequence: Synthetic oligonucleotide
uggaccacugucaucgaac

SEQ ID NO: 3884 - RNA, 19 nt, Artificial Sequence
  Description of Artificial Sequence: Synthetic oligonucleotide
uggcccacacacucaccga

SEQ ID NO: 3885 - RNA, 19 nt, Artificial Sequence
  Description of Artificial Sequence: Synthetic oligonucleotide
uguggggguggccaucccu

SEQ ID NO: 3886 - RNA, 19 nt, Artificial Sequence
  Description of Artificial Sequence: Synthetic oligonucleotide
uuaagaucacagacuucgg

SEQ ID NO: 3887 - RNA, 19 nt, Artificial Sequence
  Description of Artificial Sequence: Synthetic oligonucleotide
uucaaaaaaaaaaaaaaaa

SEQ ID NO: 3888 - RNA, 19 nt, Artificial Sequence
  Description of Artificial Sequence: Synthetic oligonucleotide
uucagggcugcucaagaag

SEQ ID NO: 3889 - RNA, 19 nt, Artificial Sequence
  Description of Artificial Sequence: Synthetic oligonucleotide
uucggcaaggugauccugg

SEQ ID NO: 3890 - RNA, 19 nt, Artificial Sequence
  Description of Artificial Sequence: Synthetic oligonucleotide
aaggacgagguggcccaca

SEQ ID NO: 3891 - RNA, 19 nt, Artificial Sequence
  Description of Artificial Sequence: Synthetic oligonucleotide
accagguauuuugaugagg

SEQ ID NO: 3892 - RNA, 19 nt, Artificial Sequence
  Description of Artificial Sequence: Synthetic oligonucleotide
aggacgagguggcccacac

SEQ ID NO: 3893 - RNA, 19 nt, Artificial Sequence
  Description of Artificial Sequence: Synthetic oligonucleotide
augaagaccuuuugcggca

SEQ ID NO: 3894 - RNA, 19 nt, Artificial Sequence
  Description of Artificial Sequence: Synthetic oligonucleotide
augagaagcuuuuugagcu

SEQ ID NO: 3895 - RNA, 19 nt, Artificial Sequence
  Description of Artificial Sequence: Synthetic oligonucleotide
auugugucagcccuggacu

SEQ ID NO: 3896 - RNA, 19 nt, Artificial Sequence
  Description of Artificial Sequence: Synthetic oligonucleotide
auuuugaugaggaguucac

SEQ ID NO: 3897 - RNA, 19 nt, Artificial Sequence
  Description of Artificial Sequence: Synthetic oligonucleotide
caacaacuucucuguggcg

SEQ ID NO: 3898 - RNA, 19 nt, Artificial Sequence
  Description of Artificial Sequence: Synthetic oligonucleotide
caugaagaccuuuugcggc

SEQ ID NO: 3899 - RNA, 19 nt, Artificial Sequence
  Description of Artificial Sequence: Synthetic oligonucleotide
caugagaagcuuuuugagc

SEQ ID NO: 3900 - RNA, 19 nt, Artificial Sequence
  Description of Artificial Sequence: Synthetic oligonucleotide
ccagguauuuugaugagga

SEQ ID NO: 3901 - RNA, 19 nt, Artificial Sequence
  Description of Artificial Sequence: Synthetic oligonucleotide
ccuugcuuucagggcugcu

SEQ ID NO: 3902 - RNA, 19 nt, Artificial Sequence
  Description of Artificial Sequence: Synthetic oligonucleotide
gcuccccucaacaacuucu

SEQ ID NO: 3903 - RNA, 19 nt, Artificial Sequence
  Description of Artificial Sequence: Synthetic oligonucleotide
gggagcguguguucuccga

SEQ ID NO: 3904 - RNA, 19 nt, Artificial Sequence
  Description of Artificial Sequence: Synthetic oligonucleotide
gguguaccgggaccucaag

SEQ ID NO: 3905 - RNA, 19 nt, Artificial Sequence
  Description of Artificial Sequence: Synthetic oligonucleotide
guguucuccgaggaccggg

SEQ ID NO: 3906 - RNA, 19 nt, Artificial Sequence
  Description of Artificial Sequence: Synthetic oligonucleotide
uauuuugaugaggaguuca

SEQ ID NO: 3907 - RNA, 19 nt, Artificial Sequence
  Description of Artificial Sequence: Synthetic oligonucleotide
uccuugcuuucagggcugc

SEQ ID NO: 3908 - RNA, 19 nt, Artificial Sequence
  Description of Artificial Sequence: Synthetic oligonucleotide
ugaagaccuuuugcggcac

SEQ ID NO: 3909 - RNA, 19 nt, Artificial Sequence
  Description of Artificial Sequence: Synthetic oligonucleotide
ugguguaccgggaccucaa

SEQ ID NO: 3910 - RNA, 19 nt, Artificial Sequence
  Description of Artificial Sequence: Synthetic oligonucleotide
uguucuccgaggaccgggc

SEQ ID NO: 3911 - RNA, 19 nt, Artificial Sequence
  Description of Artificial Sequence: Synthetic oligonucleotide
uugcuuucagggcugcuca

SEQ ID NO: 3912 - RNA, 19 nt, Artificial Sequence
  Description of Artificial Sequence: Synthetic oligonucleotide
uugugucagcccuggacua

SEQ ID NO: 3913 - RNA, 19 nt, Artificial Sequence
  Description of Artificial Sequence: Synthetic oligonucleotide
aaaccucaggucacguccg

SEQ ID NO: 3914 - RNA, 19 nt, Artificial Sequence
  Description of Artificial Sequence: Synthetic oligonucleotide
aaguaugccuuccagaccc

SEQ ID NO: 3915 - RNA, 19 nt, Artificial Sequence
  Description of Artificial Sequence: Synthetic oligonucleotide
aagucccugcuugcugggc

SEQ ID NO: 3916 - RNA, 19 nt, Artificial Sequence
  Description of Artificial Sequence: Synthetic oligonucleotide
acaaccaggaccacgagcg

SEQ ID NO: 3917 - RNA, 19 nt, Artificial Sequence
  Description of Artificial Sequence: Synthetic oligonucleotide
accuuccacguggauucuc

SEQ ID NO: 3918 - RNA, 19 nt, Artificial Sequence
  Description of Artificial Sequence: Synthetic oligonucleotide
ccgcugccgcugccggcgc

SEQ ID NO: 3919 - RNA, 19 nt, Artificial Sequence
  Description of Artificial Sequence: Synthetic oligonucleotide
auggccacaucaagaucac

SEQ ID NO: 3920 - RNA, 19 nt, Artificial Sequence
  Description of Artificial Sequence: Synthetic oligonucleotide
acgugguauaccgcgacau

SEQ ID NO: 3921 - RNA, 19 nt, Artificial Sequence
  Description of Artificial Sequence: Synthetic oligonucleotide
augccuuccagacccacga

SEQ ID NO: 3922 - RNA, 19 nt, Artificial Sequence
  Description of Artificial Sequence: Synthetic oligonucleotide
ggaaggaagucaucauugc

SEQ ID NO: 3923 - RNA, 19 nt, Artificial Sequence
  Description of Artificial Sequence: Synthetic oligonucleotide
cgccgccgccgcugccgcu

SEQ ID NO: 3924 - RNA, 19 nt, Artificial Sequence
  Description of Artificial Sequence: Synthetic oligonucleotide
agaggcuugguggggggcc

SEQ ID NO: 3925 - RNA, 19 nt, Artificial Sequence
  Description of Artificial Sequence: Synthetic oligonucleotide
aaccucaggucacguccga

SEQ ID NO: 3926 - RNA, 19 nt, Artificial Sequence
  Description of Artificial Sequence: Synthetic oligonucleotide
agaggccgcgacccaacac

SEQ ID NO: 3927 - RNA, 19 nt, Artificial Sequence
  Description of Artificial Sequence: Synthetic oligonucleotide
aguaugccuuccagaccca

SEQ ID NO: 3928 - RNA, 19 nt, Artificial Sequence
  Description of Artificial Sequence: Synthetic oligonucleotide
agucccugcuugcugggcu

SEQ ID NO: 3929 - RNA, 19 nt, Artificial Sequence
  Description of Artificial Sequence: Synthetic oligonucleotide
acggcuccuucauugggua

SEQ ID NO: 3930 - RNA, 19 nt, Artificial Sequence
  Description of Artificial Sequence: Synthetic oligonucleotide
aucaagaucacugacuuug

SEQ ID NO: 3931 - RNA, 19 nt, Artificial Sequence
  Description of Artificial Sequence: Synthetic oligonucleotide
caaaccucaggucacgucc

SEQ ID NO: 3932 - RNA, 19 nt, Artificial Sequence
  Description of Artificial Sequence: Synthetic oligonucleotide
caaggaggucauggagcac

SEQ ID NO: 3933 - RNA, 19 nt, Artificial Sequence
  Description of Artificial Sequence: Synthetic oligonucleotide
caagucccugcuugcuggg

SEQ ID NO: 3934 - RNA, 19 nt, Artificial Sequence
  Description of Artificial Sequence: Synthetic oligonucleotide
cagaggcuugguggggggc

SEQ ID NO: 3935 - RNA, 19 nt, Artificial Sequence
  Description of Artificial Sequence: Synthetic oligonucleotide
caucaagaucacugacuuu

SEQ ID NO: 3936 - RNA, 19 nt, Artificial Sequence
  Description of Artificial Sequence: Synthetic oligonucleotide
ccaagucccugcuugcugg

SEQ ID NO: 3937 - RNA, 19 nt, Artificial Sequence
  Description of Artificial Sequence: Synthetic oligonucleotide
ccugcugcccugagcuguc

SEQ ID NO: 3938 - RNA, 19 nt, Artificial Sequence
  Description of Artificial Sequence: Synthetic oligonucleotide
cccuuaaacaacuucuccg

SEQ ID NO: 3939 - RNA, 19 nt, Artificial Sequence
  Description of Artificial Sequence: Synthetic oligonucleotide
ccuuaaacaacuucuccgu

SEQ ID NO: 3940 - RNA, 19 nt, Artificial Sequence
  Description of Artificial Sequence: Synthetic oligonucleotide
ccuuccacguggauucucc

SEQ ID NO: 3941 - RNA, 19 nt, Artificial Sequence
  Description of Artificial Sequence: Synthetic oligonucleotide
cccugcuugcugggcugcu

SEQ ID NO: 3942 - RNA, 19 nt, Artificial Sequence
  Description of Artificial Sequence: Synthetic oligonucleotide
cguggugaauacaucaaga

SEQ ID NO: 3943 - RNA, 19 nt, Artificial Sequence
  Description of Artificial Sequence: Synthetic oligonucleotide
cgcugccgcugccggcgcc

SEQ ID NO: 3944 - RNA, 19 nt, Artificial Sequence
  Description of Artificial Sequence: Synthetic oligonucleotide
uggcaaagucauccuggug

SEQ ID NO: 3945 - RNA, 19 nt, Artificial Sequence
  Description of Artificial Sequence: Synthetic oligonucleotide
cgacccaacaccuuuguca

SEQ ID NO: 3946 - RNA, 19 nt, Artificial Sequence
  Description of Artificial Sequence: Synthetic oligonucleotide
aggccgcgacccaacaccu

SEQ ID NO: 3947 - RNA, 19 nt, Artificial Sequence
  Description of Artificial Sequence: Synthetic oligonucleotide
caggagcucaggcuggaga

SEQ ID NO: 3948 - RNA, 19 nt, Artificial Sequence
  Description of Artificial Sequence: Synthetic oligonucleotide
cgcgacaucaagcuggaaa

SEQ ID NO: 3949 - RNA, 19 nt, Artificial Sequence
  Description of Artificial Sequence: Synthetic oligonucleotide
cgugguauaccgcgacauc

SEQ ID NO: 3950 - RNA, 19 nt, Artificial Sequence
  Description of Artificial Sequence: Synthetic oligonucleotide
cccccuuaaacaacuucuc

SEQ ID NO: 3951 - RNA, 19 nt, Artificial Sequence
  Description of Artificial Sequence: Synthetic oligonucleotide
ugccuuccagacccacgac

SEQ ID NO: 3952 - RNA, 19 nt, Artificial Sequence
  Description of Artificial Sequence: Synthetic oligonucleotide
cugaggagauggaaguggc

SEQ ID NO: 3953 - RNA, 19 nt, Artificial Sequence
  Description of Artificial Sequence: Synthetic oligonucleotide
cugaaguaugccuuccaga

SEQ ID NO: 3954 - RNA, 19 nt, Artificial Sequence
  Description of Artificial Sequence: Synthetic oligonucleotide
cucugcaaagagggcauca

SEQ ID NO: 3955 - RNA, 19 nt, Artificial Sequence
  Description of Artificial Sequence: Synthetic oligonucleotide
ggacgugguauaccgcgac

SEQ ID NO: 3956 - RNA, 19 nt, Artificial Sequence
  Description of Artificial Sequence: Synthetic oligonucleotide
gaaguaugccuuccagacc

SEQ ID NO: 3957 - RNA, 19 nt, Artificial Sequence
  Description of Artificial Sequence: Synthetic oligonucleotide
gccgcugccgcugccggcg

SEQ ID NO: 3958 - RNA, 19 nt, Artificial Sequence
  Description of Artificial Sequence: Synthetic oligonucleotide
gauggccacaucaagauca

SEQ ID NO: 3959 - RNA, 19 nt, Artificial Sequence
  Description of Artificial Sequence: Synthetic oligonucleotide
gagaggccgcgacccaaca

SEQ ID NO: 3960 - RNA, 19 nt, Artificial Sequence
  Description of Artificial Sequence: Synthetic oligonucleotide
gaggcuugguggggggccc

SEQ ID NO: 3961 - RNA, 19 nt, Artificial Sequence
  Description of Artificial Sequence: Synthetic oligonucleotide
guggugaauacaucaagac

SEQ ID NO: 3962 - RNA, 19 nt, Artificial Sequence
  Description of Artificial Sequence: Synthetic oligonucleotide
gacggcuccuucauugggu

SEQ ID NO: 3963 - RNA, 19 nt, Artificial Sequence
  Description of Artificial Sequence: Synthetic oligonucleotide
gcaagggaaccuuuggcaa

SEQ ID NO: 3964 - RNA, 19 nt, Artificial Sequence
  Description of Artificial Sequence: Synthetic oligonucleotide
ccacaucaagaucacugac

SEQ ID NO: 3965 - RNA, 19 nt, Artificial Sequence
  Description of Artificial Sequence: Synthetic oligonucleotide
gccaagucccugcuugcug

SEQ ID NO: 3966 - RNA, 19 nt, Artificial Sequence
  Description of Artificial Sequence: Synthetic oligonucleotide
accucaggucacguccgag

SEQ ID NO: 3967 - RNA, 19 nt, Artificial Sequence
  Description of Artificial Sequence: Synthetic oligonucleotide
gccgcgacccaacaccuuu

SEQ ID NO: 3968 - RNA, 19 nt, Artificial Sequence
  Description of Artificial Sequence: Synthetic oligonucleotide
gaggccgcgacccaacacc

SEQ ID NO: 3969 - RNA, 19 nt, Artificial Sequence
  Description of Artificial Sequence: Synthetic oligonucleotide
cgacaucaagcuggaaaac

SEQ ID NO: 3970 - RNA, 19 nt, Artificial Sequence
  Description of Artificial Sequence: Synthetic oligonucleotide
ugacggggccaccaugaaa

SEQ ID NO: 3971 - RNA, 19 nt, Artificial Sequence
  Description of Artificial Sequence: Synthetic oligonucleotide
ggcaagggaaccuuuggca

SEQ ID NO: 3972 - RNA, 19 nt, Artificial Sequence
  Description of Artificial Sequence: Synthetic oligonucleotide
ggcaaagucauccuggugc

SEQ ID NO: 3973 - RNA, 19 nt, Artificial Sequence
  Description of Artificial Sequence: Synthetic oligonucleotide
gccacaucaagaucacuga

SEQ ID NO: 3974 - RNA, 19 nt, Artificial Sequence
  Description of Artificial Sequence: Synthetic oligonucleotide
ggccaagucccugcuugcu

SEQ ID NO: 3975 - RNA, 19 nt, Artificial Sequence
  Description of Artificial Sequence: Synthetic oligonucleotide
gacccaacaccuuugucau

SEQ ID NO: 3976 - RNA, 19 nt, Artificial Sequence
  Description of Artificial Sequence: Synthetic oligonucleotide
gcgacaucaagcuggaaaa

SEQ ID NO: 3977 - RNA, 19 nt, Artificial Sequence
  Description of Artificial Sequence: Synthetic oligonucleotide
ggccacaucaagaucacug

SEQ ID NO: 3978 - RNA, 19 nt, Artificial Sequence
  Description of Artificial Sequence: Synthetic oligonucleotide
gguauaccgcgacaucaag

SEQ ID NO: 3979 - RNA, 19 nt, Artificial Sequence
  Description of Artificial Sequence: Synthetic oligonucleotide
auaccgcgacaucaagcug

SEQ ID NO: 3980 - RNA, 19 nt, Artificial Sequence
  Description of Artificial Sequence: Synthetic oligonucleotide
guaugccuuccagacccac

SEQ ID NO: 3981 - RNA, 19 nt, Artificial Sequence
  Description of Artificial Sequence: Synthetic oligonucleotide
gucccugcuugcugggcug

SEQ ID NO: 3982 - RNA, 19 nt, Artificial Sequence
  Description of Artificial Sequence: Synthetic oligonucleotide
gugaccaugaaugacuucg

SEQ ID NO: 3983 - RNA, 19 nt, Artificial Sequence
  Description of Artificial Sequence: Synthetic oligonucleotide
gugguauaccgcgacauca

SEQ ID NO: 3984 - RNA, 19 nt, Artificial Sequence
  Description of Artificial Sequence: Synthetic oligonucleotide
guauaccgcgacaucaagc

SEQ ID NO: 3985 - RNA, 19 nt, Artificial Sequence
  Description of Artificial Sequence: Synthetic oligonucleotide
uaugccuuccagacccacg

SEQ ID NO: 3986 - RNA, 19 nt, Artificial Sequence
  Description of Artificial Sequence: Synthetic oligonucleotide
uccuacucggccagcaucc

SEQ ID NO: 3987 - RNA, 19 nt, Artificial Sequence
  Description of Artificial Sequence: Synthetic oligonucleotide
ucccugcuugcugggcugc

SEQ ID NO: 3988 - RNA, 19 nt, Artificial Sequence
  Description of Artificial Sequence: Synthetic oligonucleotide
uuggcaaagucauccuggu

SEQ ID NO: 3989 - RNA, 19 nt, Artificial Sequence
  Description of Artificial Sequence: Synthetic oligonucleotide
ugaccaugaaugacuucga

SEQ ID NO: 3990 - RNA, 19 nt, Artificial Sequence
  Description of Artificial Sequence: Synthetic oligonucleotide
cggcuccuucauuggguac

SEQ ID NO: 3991 - RNA, 19 nt, Artificial Sequence
  Description of Artificial Sequence: Synthetic oligonucleotide
ugguauaccgcgacaucaa

SEQ ID NO: 3992 - RNA, 19 nt, Artificial Sequence
  Description of Artificial Sequence: Synthetic oligonucleotide
uauaccgcgacaucaagcu

SEQ ID NO: 3993 - RNA, 19 nt, Artificial Sequence
  Description of Artificial Sequence: Synthetic oligonucleotide
ucaagaucacugacuuugg

SEQ ID NO: 3994 - RNA, 19 nt, Artificial Sequence
  Description of Artificial Sequence: Synthetic oligonucleotide
cucuaaaaauaaaaaaaaa

SEQ ID NO: 3995 - RNA, 19 nt, Artificial Sequence
  Description of Artificial Sequence: Synthetic oligonucleotide
uuuggcaaagucauccugg

SEQ ID NO: 3996 - RNA, 19 nt, Artificial Sequence
  Description of Artificial Sequence: Synthetic oligonucleotide
ucucuaaaaauaaaaaaaa

SEQ ID NO: 3997 - RNA, 19 nt, Artificial Sequence
  Description of Artificial Sequence: Synthetic oligonucleotide
augaaaaccuucuguggga

SEQ ID NO: 3998 - RNA, 19 nt, Artificial Sequence
  Description of Artificial Sequence: Synthetic oligonucleotide
augaugaauuuaccgccca

SEQ ID NO: 3999 - RNA, 19 nt, Artificial Sequence
  Description of Artificial Sequence: Synthetic oligonucleotide
caaugacuauggccgggcc

SEQ ID NO: 4000 - RNA, 19 nt, Artificial Sequence
  Description of Artificial Sequence: Synthetic oligonucleotide
caugaaaaccuucuguggg

SEQ ID NO: 4001 - RNA, 19 nt, Artificial Sequence
  Description of Artificial Sequence: Synthetic oligonucleotide
cauugccaaggaugaaguc

SEQ ID NO: 4002 - RNA, 19 nt, Artificial Sequence
  Description of Artificial Sequence: Synthetic oligonucleotide
gaugaugaauuuaccgccc

SEQ ID NO: 4003 - RNA, 19 nt, Artificial Sequence
  Description of Artificial Sequence: Synthetic oligonucleotide
ucgaugaugaauuuaccgc

SEQ ID NO: 4004 - RNA, 19 nt, Artificial Sequence
  Description of Artificial Sequence: Synthetic oligonucleotide
ugaaaaccuucugugggac

SEQ ID NO: 4005 - RNA, 19 nt, Artificial Sequence
  Description of Artificial Sequence: Synthetic oligonucleotide
ugaugaauuuaccgcccag

SEQ ID NO: 4006 - RNA, 19 nt, Artificial Sequence
  Description of Artificial Sequence: Synthetic oligonucleotide
uucgaugaugaauuuaccg

SEQ ID NO: 4007 - RNA, 19 nt, Artificial Sequence
  Description of Artificial Sequence: Synthetic oligonucleotide
uuggccucugcaaagaggg

SEQ ID NO: 4008 - RNA, 19 nt, Artificial Sequence
  Description of Artificial Sequence: Synthetic oligonucleotide
uuuggccucugcaaagagg

SEQ ID NO: 4009 - RNA, 19 nt, Artificial Sequence
  Description of Artificial Sequence: Synthetic oligonucleotide
aagauucugaagaaagaag

SEQ ID NO: 4010 - RNA, 19 nt, Artificial Sequence
  Description of Artificial Sequence: Synthetic oligonucleotide
auacuagauauuuugauga

SEQ ID NO: 4011 - RNA, 19 nt, Artificial Sequence
  Description of Artificial Sequence: Synthetic oligonucleotide
acugguggggccuaggggu

SEQ ID NO: 4012 - RNA, 19 nt, Artificial Sequence
  Description of Artificial Sequence: Synthetic oligonucleotide
agauucugaagaaagaagu

SEQ ID NO: 4013 - RNA, 19 nt, Artificial Sequence
  Description of Artificial Sequence: Synthetic oligonucleotide
augaagacauucuguggca

SEQ ID NO: 4014 - RNA, 19 nt, Artificial Sequence
  Description of Artificial Sequence: Synthetic oligonucleotide
augaagauucugaagaaag

SEQ ID NO: 4015 - RNA, 19 nt, Artificial Sequence
  Description of Artificial Sequence: Synthetic oligonucleotide
auguaugaaaugaugugug

SEQ ID NO: 4016 - RNA, 19 nt, Artificial Sequence
  Description of Artificial Sequence: Synthetic oligonucleotide
auguagauacuccagagga

SEQ ID NO: 4017 - RNA, 19 nt, Artificial Sequence
  Description of Artificial Sequence: Synthetic oligonucleotide
caacaacuuuucaguggca

SEQ ID NO: 4018 - RNA, 19 nt, Artificial Sequence
  Description of Artificial Sequence: Synthetic oligonucleotide
aaaaucauugcuuucaggg

SEQ ID NO: 4019 - RNA, 19 nt, Artificial Sequence
  Description of Artificial Sequence: Synthetic oligonucleotide
caugaagacauucuguggc

SEQ ID NO: 4020 - RNA, 19 nt, Artificial Sequence
  Description of Artificial Sequence: Synthetic oligonucleotide
cauguaugaaaugaugugu

SEQ ID NO: 4021 - RNA, 19 nt, Artificial Sequence
  Description of Artificial Sequence: Synthetic oligonucleotide
caaaaucauugcuuucagg

SEQ ID NO: 4022 - RNA, 19 nt, Artificial Sequence
  Description of Artificial Sequence: Synthetic oligonucleotide
uuaccuuucuacaaccagg

SEQ ID NO: 4023 - RNA, 19 nt, Artificial Sequence
  Description of Artificial Sequence: Synthetic oligonucleotide
gaaucuaaugcuggacaaa

SEQ ID NO: 4024 - RNA, 19 nt, Artificial Sequence
  Description of Artificial Sequence: Synthetic oligonucleotide
gaagauucugaagaaagaa

SEQ ID NO: 4025 - RNA, 19 nt, Artificial Sequence
  Description of Artificial Sequence: Synthetic oligonucleotide
gauacuagauauuuugaug

SEQ ID NO: 4026 - RNA, 19 nt, Artificial Sequence
  Description of Artificial Sequence: Synthetic oligonucleotide
gauucugaagaaagaaguc

SEQ ID NO: 4027 - RNA, 19 nt, Artificial Sequence
  Description of Artificial Sequence: Synthetic oligonucleotide
gcaaaaucauugcuuucag

SEQ ID NO: 4028 - RNA, 19 nt, Artificial Sequence
  Description of Artificial Sequence: Synthetic oligonucleotide
agagcggguguucucugag

SEQ ID NO: 4029 - RNA, 19 nt, Artificial Sequence
  Description of Artificial Sequence: Synthetic oligonucleotide
gagagcggguguucucuga

SEQ ID NO: 4030 - RNA, 19 nt, Artificial Sequence
  Description of Artificial Sequence: Synthetic oligonucleotide
ugucauguaugaaaugaug

SEQ ID NO: 4031 - RNA, 19 nt, Artificial Sequence
  Description of Artificial Sequence: Synthetic oligonucleotide
aucauugcuuucagggcuc

SEQ ID NO: 4032 - RNA, 19 nt, Artificial Sequence
  Description of Artificial Sequence: Synthetic oligonucleotide
guguucucugaggaccgca

SEQ ID NO: 4033 - RNA, 19 nt, Artificial Sequence
  Description of Artificial Sequence: Synthetic oligonucleotide
ucccucaauuuuccuacuc

SEQ ID NO: 4034 - RNA, 19 nt, Artificial Sequence
  Description of Artificial Sequence: Synthetic oligonucleotide
uucugaagaaagaagucau

SEQ ID NO: 4035 - RNA, 19 nt, Artificial Sequence
  Description of Artificial Sequence: Synthetic oligonucleotide
ugaagacauucuguggcac

SEQ ID NO: 4036 - RNA, 19 nt, Artificial Sequence
  Description of Artificial Sequence: Synthetic oligonucleotide
ugaagauucugaagaaaga

SEQ ID NO: 4037 - RNA, 19 nt, Artificial Sequence
  Description of Artificial Sequence: Synthetic oligonucleotide
agcaguagacugguggggc

SEQ ID NO: 4038 - RNA, 19 nt, Artificial Sequence
  Description of Artificial Sequence: Synthetic oligonucleotide
agccaccaugaagacauuc

SEQ ID NO: 4039 - RNA, 19 nt, Artificial Sequence
  Description of Artificial Sequence: Synthetic oligonucleotide
uugucauguaugaaaugau

SEQ ID NO: 4040 - RNA, 19 nt, Artificial Sequence
  Description of Artificial Sequence: Synthetic oligonucleotide
uguaugaaaugaugugugg

SEQ ID NO: 4041 - RNA, 19 nt, Artificial Sequence
  Description of Artificial Sequence: Synthetic oligonucleotide
uguucucugaggaccgcac

SEQ ID NO: 4042 - RNA, 19 nt, Artificial Sequence
  Description of Artificial Sequence: Synthetic oligonucleotide
uucccucaauuuuccuacu

SEQ ID NO: 4043 - RNA, 19 nt, Artificial Sequence
  Description of Artificial Sequence: Synthetic oligonucleotide
aaagaagucauuauugcaa

SEQ ID NO: 4044 - RNA, 19 nt, Artificial Sequence
  Description of Artificial Sequence: Synthetic oligonucleotide
aacuggaggccaagauacu

SEQ ID NO: 4045 - RNA, 19 nt, Artificial Sequence
  Description of Artificial Sequence: Synthetic oligonucleotide
agauggccacauaaaaauu

SEQ ID NO: 4046 - RNA, 19 nt, Artificial Sequence
  Description of Artificial Sequence: Synthetic oligonucleotide
aagaagucauuauugcaaa

SEQ ID NO: 4047 - RNA, 19 nt, Artificial Sequence
  Description of Artificial Sequence: Synthetic oligonucleotide
auggccacauaaaaauuac

SEQ ID NO: 4048 - RNA, 19 nt, Artificial Sequence
  Description of Artificial Sequence: Synthetic oligonucleotide
auacuccagaggaaaggga

SEQ ID NO: 4049 - RNA, 19 nt, Artificial Sequence
  Description of Artificial Sequence: Synthetic oligonucleotide
uaaugacuauggccgagca

SEQ ID NO: 4050 - RNA, 19 nt, Artificial Sequence
  Description of Artificial Sequence: Synthetic oligonucleotide
cacguuucuauggugcaga

SEQ ID NO: 4051 - RNA, 19 nt, Artificial Sequence
  Description of Artificial Sequence: Synthetic oligonucleotide
acuggaggccaagauacuu

SEQ ID NO: 4052 - RNA, 19 nt, Artificial Sequence
  Description of Artificial Sequence: Synthetic oligonucleotide
uugaaauauuccuuccaga

SEQ ID NO: 4053 - RNA, 19 nt, Artificial Sequence
  Description of Artificial Sequence: Synthetic oligonucleotide
uuguguuuugugauggaau

SEQ ID NO: 4054 - RNA, 19 nt, Artificial Sequence
  Description of Artificial Sequence: Synthetic oligonucleotide
gaaagaagucauuauugca

SEQ ID NO: 4055 - RNA, 19 nt, Artificial Sequence
  Description of Artificial Sequence: Synthetic oligonucleotide
gaaauauuccuuccagaca

SEQ ID NO: 4056 - RNA, 19 nt, Artificial Sequence
  Description of Artificial Sequence: Synthetic oligonucleotide
gaggccaagauacuuccuu

SEQ ID NO: 4057 - RNA, 19 nt, Artificial Sequence
  Description of Artificial Sequence: Synthetic oligonucleotide
gauggccacauaaaaauua

SEQ ID NO: 4058 - RNA, 19 nt, Artificial Sequence
  Description of Artificial Sequence: Synthetic oligonucleotide
gauacuccagaggaaaggg

SEQ ID NO: 4059 - RNA, 19 nt, Artificial Sequence
  Description of Artificial Sequence: Synthetic oligonucleotide
guuuugugauggaauaugu

SEQ ID NO: 4060 - RNA, 19 nt, Artificial Sequence
  Description of Artificial Sequence: Synthetic oligonucleotide
agaagucauuauugcaaag

SEQ ID NO: 4061 - RNA, 19 nt, Artificial Sequence
  Description of Artificial Sequence: Synthetic oligonucleotide
uuggacuuugcaaagaagg

SEQ ID NO: 4062 - RNA, 19 nt, Artificial Sequence
  Description of Artificial Sequence: Synthetic oligonucleotide
uugugauggaauauguuaa

SEQ ID NO: 4063 - RNA, 19 nt, Artificial Sequence
  Description of Artificial Sequence: Synthetic oligonucleotide
uuuggacuuugcaaagaag

SEQ ID NO: 4064 - RNA, 19 nt, Artificial Sequence
  Description of Artificial Sequence: Synthetic oligonucleotide
uuugugauggaauauguua

SEQ ID NO: 4065 - RNA, 19 nt, Artificial Sequence
  Description of Artificial Sequence: Synthetic oligonucleotide
aagaagcucagcccacccu

SEQ ID NO: 4066 - RNA, 19 nt, Artificial Sequence
  Description of Artificial Sequence: Synthetic oligonucleotide
aagcucagcccacccuuca

SEQ ID NO: 4067 - RNA, 19 nt, Artificial Sequence
  Description of Artificial Sequence: Synthetic oligonucleotide
accccuuccucacagcccu

SEQ ID NO: 4068 - RNA, 19 nt, Artificial Sequence
  Description of Artificial Sequence: Synthetic oligonucleotide
accuuccauguggagacuc

SEQ ID NO: 4069 - RNA, 19 nt, Artificial Sequence
  Description of Artificial Sequence: Synthetic oligonucleotide
acgcuacuuccuccucaag

SEQ ID NO: 4070 - RNA, 19 nt, Artificial Sequence
  Description of Artificial Sequence: Synthetic oligonucleotide
acgcuuggucccgaggcca

SEQ ID NO: 4071 - RNA, 19 nt, Artificial Sequence
  Description of Artificial Sequence: Synthetic oligonucleotide
acgugguguaccgggaccu

SEQ ID NO: 4072 - RNA, 19 nt, Artificial Sequence
  Description of Artificial Sequence: Synthetic oligonucleotide
acguguacgagaagaagcu

SEQ ID NO: 4073 - RNA, 19 nt, Artificial Sequence
  Description of Artificial Sequence: Synthetic oligonucleotide
agaagcucagcccacccuu

SEQ ID NO: 4074 - RNA, 19 nt, Artificial Sequence
  Description of Artificial Sequence: Synthetic oligonucleotide
agcggccccggcccaacac

SEQ ID NO: 4075 - RNA, 19 nt, Artificial Sequence
  Description of Artificial Sequence: Synthetic oligonucleotide
agcucagcccacccuucaa

SEQ ID NO: 4076 - RNA, 19 nt, Artificial Sequence
  Description of Artificial Sequence: Synthetic oligonucleotide
augaagacggagcggcccc

SEQ ID NO: 4077 - RNA, 19 nt, Artificial Sequence
  Description of Artificial Sequence: Synthetic oligonucleotide
caaguccuugcuuucaggg

SEQ ID NO: 4078 - RNA, 19 nt, Artificial Sequence
  Description of Artificial Sequence: Synthetic oligonucleotide
caccccuuccucacagccc

SEQ ID NO: 4079 - RNA, 19 nt, Artificial Sequence
  Description of Artificial Sequence: Synthetic oligonucleotide
cacgcuacuuccuccucaa

SEQ ID NO: 4080 - RNA, 19 nt, Artificial Sequence
  Description of Artificial Sequence: Synthetic oligonucleotide
cacgcuuggucccgaggcc

SEQ ID NO: 4081 - RNA, 19 nt, Artificial Sequence
  Description of Artificial Sequence: Synthetic oligonucleotide
ccaaguccuugcuuucagg

SEQ ID NO: 4082 - RNA, 19 nt, Artificial Sequence
  Description of Artificial Sequence: Synthetic oligonucleotide
ccacgcuacuuccuccuca

SEQ ID NO: 4083 - RNA, 19 nt, Artificial Sequence
  Description of Artificial Sequence: Synthetic oligonucleotide
ccagacgcugccgcugccg

SEQ ID NO: 4084 - RNA, 19 nt, Artificial Sequence
  Description of Artificial Sequence: Synthetic oligonucleotide
cccgcgcacgcuugguccc

SEQ ID NO: 4085 - RNA, 19 nt, Artificial Sequence
  Description of Artificial Sequence: Synthetic oligonucleotide
cccuuccucacagcccuga

SEQ ID NO: 4086 - RNA, 19 nt, Artificial Sequence
  Description of Artificial Sequence: Synthetic oligonucleotide
ccgaggaccgggcccgcuu

SEQ ID NO: 4087 - RNA, 19 nt, Artificial Sequence
  Description of Artificial Sequence: Synthetic oligonucleotide
ccgcgcacgcuuggucccg

SEQ ID NO: 4088 - RNA, 19 nt, Artificial Sequence
  Description of Artificial Sequence: Synthetic oligonucleotide
ccgggagcguguguucucc

SEQ ID NO: 4089 - RNA, 19 nt, Artificial Sequence
  Description of Artificial Sequence: Synthetic oligonucleotide
ccugaggagcgggaggagu

SEQ ID NO: 4090 - RNA, 19 nt, Artificial Sequence
  Description of Artificial Sequence: Synthetic oligonucleotide
ccugcccauguguccccuc

SEQ ID NO: 4091 - RNA, 19 nt, Artificial Sequence
  Description of Artificial Sequence: Synthetic oligonucleotide
ccuuccauguggagacucc

SEQ ID NO: 4092 - RNA, 19 nt, Artificial Sequence
  Description of Artificial Sequence: Synthetic oligonucleotide
ccuuccucacagcccugaa

SEQ ID NO: 4093 - RNA, 19 nt, Artificial Sequence
  Description of Artificial Sequence: Synthetic oligonucleotide
cgaggggaguacaucaaga

SEQ ID NO: 4094 - RNA, 19 nt, Artificial Sequence
  Description of Artificial Sequence: Synthetic oligonucleotide
cgcacgcuuggucccgagg

SEQ ID NO: 4095 - RNA, 19 nt, Artificial Sequence
  Description of Artificial Sequence: Synthetic oligonucleotide
cgcagugccagcugaugaa

SEQ ID NO: 4096 - RNA, 19 nt, Artificial Sequence
  Description of Artificial Sequence: Synthetic oligonucleotide
cgcgcacgcuuggucccga

SEQ ID NO: 4097 - RNA, 19 nt, Artificial Sequence
  Description of Artificial Sequence: Synthetic oligonucleotide
cgcguccugcagaacucca

SEQ ID NO: 4098 - RNA, 19 nt, Artificial Sequence
  Description of Artificial Sequence: Synthetic oligonucleotide
cgcuacuuccuccucaaga

SEQ ID NO: 4099 - RNA, 19 nt, Artificial Sequence
  Description of Artificial Sequence: Synthetic oligonucleotide
cgcuuggucccgaggccaa

SEQ ID NO: 4100 - RNA, 19 nt, Artificial Sequence
  Description of Artificial Sequence: Synthetic oligonucleotide
cggccacgcuacuuccucc

SEQ ID NO: 4101 - RNA, 19 nt, Artificial Sequence
  Description of Artificial Sequence: Synthetic oligonucleotide
cggccccggcccaacaccu

SEQ ID NO: 4102 - RNA, 19 nt, Artificial Sequence
  Description of Artificial Sequence: Synthetic oligonucleotide
cgggagcguguguucuccg

SEQ ID NO: 4103 - RNA, 19 nt, Artificial Sequence
  Description of Artificial Sequence: Synthetic oligonucleotide
cguccugcagaacuccagg

SEQ ID NO: 4104 - RNA, 19 nt, Artificial Sequence
  Description of Artificial Sequence: Synthetic oligonucleotide
cgugguguaccgggaccuc

SEQ ID NO: 4105 - RNA, 19 nt, Artificial Sequence
  Description of Artificial Sequence: Synthetic oligonucleotide
cugaggagcgggaggagug

SEQ ID NO: 4106 - RNA, 19 nt, Artificial Sequence
  Description of Artificial Sequence: Synthetic oligonucleotide
cugugcaaggaggggauca

SEQ ID NO: 4107 - RNA, 19 nt, Artificial Sequence
  Description of Artificial Sequence: Synthetic oligonucleotide
cuuccucacagcccugaag

SEQ ID NO: 4108 - RNA, 19 nt, Artificial Sequence
  Description of Artificial Sequence: Synthetic oligonucleotide
cuuggucccgaggccaagu

SEQ ID NO: 4109 - RNA, 19 nt, Artificial Sequence
  Description of Artificial Sequence: Synthetic oligonucleotide
gaagcucagcccacccuuc

SEQ ID NO: 4110 - RNA, 19 nt, Artificial Sequence
  Description of Artificial Sequence: Synthetic oligonucleotide
gaggggaguacaucaagac

SEQ ID NO: 4111 - RNA, 19 nt, Artificial Sequence
  Description of Artificial Sequence: Synthetic oligonucleotide
gaucaccaucacaccaccu

SEQ ID NO: 4112 - RNA, 19 nt, Artificial Sequence
  Description of Artificial Sequence: Synthetic oligonucleotide
gaugaagacggagcggccc

SEQ ID NO: 4113 - RNA, 19 nt, Artificial Sequence
  Description of Artificial Sequence: Synthetic oligonucleotide
gauggcaccuucauuggcu

SEQ ID NO: 4114 - RNA, 19 nt, Artificial Sequence
  Description of Artificial Sequence: Synthetic oligonucleotide
gcacauuaagaucacagac

SEQ ID NO: 4115 - RNA, 19 nt, Artificial Sequence
  Description of Artificial Sequence: Synthetic oligonucleotide
gcaccccuuccucacagcc

SEQ ID NO: 4116 - RNA, 19 nt, Artificial Sequence
  Description of Artificial Sequence: Synthetic oligonucleotide
gcacgcuuggucccgaggc

SEQ ID NO: 4117 - RNA, 19 nt, Artificial Sequence
  Description of Artificial Sequence: Synthetic oligonucleotide
gcagaacuccaggcacccc

SEQ ID NO: 4118 - RNA, 19 nt, Artificial Sequence
  Description of Artificial Sequence: Synthetic oligonucleotide
gcagugccagcugaugaag

SEQ ID NO: 4119 - RNA, 19 nt, Artificial Sequence
  Description of Artificial Sequence: Synthetic oligonucleotide
gccaaguccuugcuuucag

SEQ ID NO: 4120 - RNA, 19 nt, Artificial Sequence
  Description of Artificial Sequence: Synthetic oligonucleotide
gccacgcuacuuccuccuc

SEQ ID NO: 4121 - RNA, 19 nt, Artificial Sequence
  Description of Artificial Sequence: Synthetic oligonucleotide
gcgcagugccagcugauga

SEQ ID NO: 4122 - RNA, 19 nt, Artificial Sequence
  Description of Artificial Sequence: Synthetic oligonucleotide
gcggccacgcuacuuccuc

SEQ ID NO: 4123 - RNA, 19 nt, Artificial Sequence
  Description of Artificial Sequence: Synthetic oligonucleotide
gcggccccggcccaacacc

SEQ ID NO: 4124 - RNA, 19 nt, Artificial Sequence
  Description of Artificial Sequence: Synthetic oligonucleotide
gcucacccagugacaacuc

SEQ ID NO: 4125 - RNA, 19 nt, Artificial Sequence
  Description of Artificial Sequence: Synthetic oligonucleotide
gcugccgcugccgcugcac

SEQ ID NO: 4126 - RNA, 19 nt, Artificial Sequence
  Description of Artificial Sequence: Synthetic oligonucleotide
gcuuggucccgaggccaag

SEQ ID NO: 4127 - RNA, 19 nt, Artificial Sequence
  Description of Artificial Sequence: Synthetic oligonucleotide
ggcaaggugauccugguga

SEQ ID NO: 4128 - RNA, 19 nt, Artificial Sequence
  Description of Artificial Sequence: Synthetic oligonucleotide
ggcacauuaagaucacaga

SEQ ID NO: 4129 - RNA, 19 nt, Artificial Sequence
  Description of Artificial Sequence: Synthetic oligonucleotide
ggcucacccagugacaacu

SEQ ID NO: 4130 - RNA, 19 nt, Artificial Sequence
  Description of Artificial Sequence: Synthetic oligonucleotide
gggcacauuaagaucacag

SEQ ID NO: 4131 - RNA, 19 nt, Artificial Sequence
  Description of Artificial Sequence: Synthetic oligonucleotide
ggucccgaggccaaguccu

SEQ ID NO: 4132 - RNA, 19 nt, Artificial Sequence
  Description of Artificial Sequence: Synthetic oligonucleotide
guccuugcuuucagggcug

SEQ ID NO: 4133 - RNA, 19 nt, Artificial Sequence
  Description of Artificial Sequence: Synthetic oligonucleotide
gugguguaccgggaccuca

SEQ ID NO: 4134 - RNA, 19 nt, Artificial Sequence
  Description of Artificial Sequence: Synthetic oligonucleotide
uacaaggagcggccgcagg

SEQ ID NO: 4135 - RNA, 19 nt, Artificial Sequence
  Description of Artificial Sequence: Synthetic oligonucleotide
uccuacucggccagcggca

SEQ ID NO: 4136 - RNA, 19 nt, Artificial Sequence
  Description of Artificial Sequence: Synthetic oligonucleotide
uccugaggagcgggaggag

SEQ ID NO: 4137 - RNA, 19 nt, Artificial Sequence
  Description of Artificial Sequence: Synthetic oligonucleotide
ucuccgaggaccgggcccg

SEQ ID NO: 4138 - RNA, 19 nt, Artificial Sequence
  Description of Artificial Sequence: Synthetic oligonucleotide
ugaagacggagcggccccg

SEQ ID NO: 4139 - RNA, 19 nt, Artificial Sequence
  Description of Artificial Sequence: Synthetic oligonucleotide
uggcaccuucauuggcuac

SEQ ID NO: 4140 - RNA, 19 nt, Artificial Sequence
  Description of Artificial Sequence: Synthetic oligonucleotide
uggcuacaaggagcggccg

SEQ ID NO: 4141 - RNA, 19 nt, Artificial Sequence
  Description of Artificial Sequence: Synthetic oligonucleotide
uggucccgaggccaagucc

SEQ ID NO: 4142 - RNA, 19 nt, Artificial Sequence
  Description of Artificial Sequence: Synthetic oligonucleotide
uucccgcgcacgcuugguc

SEQ ID NO: 4143 - RNA, 19 nt, Artificial Sequence
  Description of Artificial Sequence: Synthetic oligonucleotide
uucuccgaggaccgggccc

SEQ ID NO: 4144 - RNA, 19 nt, Artificial Sequence
  Description of Artificial Sequence: Synthetic oligonucleotide
uuggucccgaggccaaguc

SEQ ID NO: 4145 - RNA, 19 nt, Artificial Sequence
  Description of Artificial Sequence: Synthetic oligonucleotide
acaccaccugaccaagaug

SEQ ID NO: 4146 - RNA, 19 nt, Artificial Sequence
  Description of Artificial Sequence: Synthetic oligonucleotide
agguauuuugaugaggagu

SEQ ID NO: 4147 - RNA, 19 nt, Artificial Sequence
  Description of Artificial Sequence: Synthetic oligonucleotide
auguggagacuccugagga

SEQ ID NO: 4148 - RNA, 19 nt, Artificial Sequence
  Description of Artificial Sequence: Synthetic oligonucleotide
auugugaaggaggguuggc

SEQ ID NO: 4149 - RNA, 19 nt, Artificial Sequence
  Description of Artificial Sequence: Synthetic oligonucleotide
caccaccugaccaagauga

SEQ ID NO: 4150 - RNA, 19 nt, Artificial Sequence
  Description of Artificial Sequence: Synthetic oligonucleotide
cauguggagacuccugagg

SEQ ID NO: 4151 - RNA, 19 nt, Artificial Sequence
  Description of Artificial Sequence: Synthetic oligonucleotide
cuauugugaaggaggguug

SEQ ID NO: 4152 - RNA, 19 nt, Artificial Sequence
  Description of Artificial Sequence: Synthetic oligonucleotide
gcacguguacgagaagaag

SEQ ID NO: 4153 - RNA, 19 nt, Artificial Sequence
  Description of Artificial Sequence: Synthetic oligonucleotide
gguauuuugaugaggaguu

SEQ ID NO: 4154 - RNA, 19 nt, Artificial Sequence
  Description of Artificial Sequence: Synthetic oligonucleotide
uauugugaaggaggguugg

SEQ ID NO: 4155 - RNA, 19 nt, Artificial Sequence
  Description of Artificial Sequence: Synthetic oligonucleotide
uugugaaggaggguuggcu

SEQ ID NO: 4156 - RNA, 19 nt, Artificial Sequence
  Description of Artificial Sequence: Synthetic oligonucleotide
aacaccuuugucauacgcu

SEQ ID NO: 4157 - RNA, 19 nt, Artificial Sequence
  Description of Artificial Sequence: Synthetic oligonucleotide
aagaagcuccugccacccu

SEQ ID NO: 4158 - RNA, 19 nt, Artificial Sequence
  Description of Artificial Sequence: Synthetic oligonucleotide
aagaucacugacuuuggcc

SEQ ID NO: 4159 - RNA, 19 nt, Artificial Sequence
  Description of Artificial Sequence: Synthetic oligonucleotide
aagauccugcggaaggaag

SEQ ID NO: 4160 - RNA, 19 nt, Artificial Sequence
  Description of Artificial Sequence: Synthetic oligonucleotide
aagcuccugccacccuuca

SEQ ID NO: 4161 - RNA, 19 nt, Artificial Sequence
  Description of Artificial Sequence: Synthetic oligonucleotide
cgggagaaggccacuggcc

SEQ ID NO: 4162 - RNA, 19 nt, Artificial Sequence
  Description of Artificial Sequence: Synthetic oligonucleotide
accccggaguaccuggcgc

SEQ ID NO: 4163 - RNA, 19 nt, Artificial Sequence
  Description of Artificial Sequence: Synthetic oligonucleotide
acaccuuugucauacgcug

SEQ ID NO: 4164 - RNA, 19 nt, Artificial Sequence
  Description of Artificial Sequence: Synthetic oligonucleotide
acagucaccgagagccggg

SEQ ID NO: 4165 - RNA, 19 nt, Artificial Sequence
  Description of Artificial Sequence: Synthetic oligonucleotide
acccguuccucacugcgcu

SEQ ID NO: 4166 - RNA, 19 nt, Artificial Sequence
  Description of Artificial Sequence: Synthetic oligonucleotide
accgagagccggguccucc

SEQ ID NO: 4167 - RNA, 19 nt, Artificial Sequence
  Description of Artificial Sequence: Synthetic oligonucleotide
agcgggcccgguuuuaugg

SEQ ID NO: 4168 - RNA, 19 nt, Artificial Sequence
  Description of Artificial Sequence: Synthetic oligonucleotide
accuuugucauacgcugcc

SEQ ID NO: 4169 - RNA, 19 nt, Artificial Sequence
  Description of Artificial Sequence: Synthetic oligonucleotide
augccaaggaggucaugga

SEQ ID NO: 4170 - RNA, 19 nt, Artificial Sequence
  Description of Artificial Sequence: Synthetic oligonucleotide
acgccaugaagauccugcg

SEQ ID NO: 4171 - RNA, 19 nt, Artificial Sequence
  Description of Artificial Sequence: Synthetic oligonucleotide
acgguacuuccugcugaag

SEQ ID NO: 4172 - RNA, 19 nt, Artificial Sequence
  Description of Artificial Sequence: Synthetic oligonucleotide
auggccgggccguggacug

SEQ ID NO: 4173 - RNA, 19 nt, Artificial Sequence
  Description of Artificial Sequence: Synthetic oligonucleotide
acgugguccagaagaagcu

SEQ ID NO: 4174 - RNA, 19 nt, Artificial Sequence
  Description of Artificial Sequence: Synthetic oligonucleotide
acuauggccgggccgugga

SEQ ID NO: 4175 - RNA, 19 nt, Artificial Sequence
  Description of Artificial Sequence: Synthetic oligonucleotide
agucaccgagagccggguc

SEQ ID NO: 4176 - RNA, 19 nt, Artificial Sequence
  Description of Artificial Sequence: Synthetic oligonucleotide
agagccggguccuccagaa

SEQ ID NO: 4177 - RNA, 19 nt, Artificial Sequence
  Description of Artificial Sequence: Synthetic oligonucleotide
agaagaagcuccugccacc

SEQ ID NO: 4178 - RNA, 19 nt, Artificial Sequence
  Description of Artificial Sequence: Synthetic oligonucleotide
agaagcuccugccacccuu

SEQ ID NO: 4179 - RNA, 19 nt, Artificial Sequence
  Description of Artificial Sequence: Synthetic oligonucleotide
agaucacugacuuuggccu

SEQ ID NO: 4180 - RNA, 19 nt, Artificial Sequence
  Description of Artificial Sequence: Synthetic oligonucleotide
agauccugcggaaggaagu

SEQ ID NO: 4181 - RNA, 19 nt, Artificial Sequence
  Description of Artificial Sequence: Synthetic oligonucleotide
agcgugucuucacagagga

SEQ ID NO: 4182 - RNA, 19 nt, Artificial Sequence
  Description of Artificial Sequence: Synthetic oligonucleotide
agcuccugccacccuucaa

SEQ ID NO: 4183 - RNA, 19 nt, Artificial Sequence
  Description of Artificial Sequence: Synthetic oligonucleotide
aggagcgggcccgguuuua

SEQ ID NO: 4184 - RNA, 19 nt, Artificial Sequence
  Description of Artificial Sequence: Synthetic oligonucleotide
acgagagggaggaguggau

SEQ ID NO: 4185 - RNA, 19 nt, Artificial Sequence
  Description of Artificial Sequence: Synthetic oligonucleotide
aucagugacggggccacca

SEQ ID NO: 4186 - RNA, 19 nt, Artificial Sequence
  Description of Artificial Sequence: Synthetic oligonucleotide
auccugcggaaggaaguca

SEQ ID NO: 4187 - RNA, 19 nt, Artificial Sequence
  Description of Artificial Sequence: Synthetic oligonucleotide
augaagaccgagaggccgc

SEQ ID NO: 4188 - RNA, 19 nt, Artificial Sequence
  Description of Artificial Sequence: Synthetic oligonucleotide
augaagauccugcggaagg

SEQ ID NO: 4189 - RNA, 19 nt, Artificial Sequence
  Description of Artificial Sequence: Synthetic oligonucleotide
caacaccuuugucauacgc

SEQ ID NO: 4190 - RNA, 19 nt, Artificial Sequence
  Description of Artificial Sequence: Synthetic oligonucleotide
cagugacggggccaccaug

SEQ ID NO: 4191 - RNA, 19 nt, Artificial Sequence
  Description of Artificial Sequence: Synthetic oligonucleotide
cacagucaccgagagccgg

SEQ ID NO: 4192 - RNA, 19 nt, Artificial Sequence
  Description of Artificial Sequence: Synthetic oligonucleotide
cacccguuccucacugcgc

SEQ ID NO: 4193 - RNA, 19 nt, Artificial Sequence
  Description of Artificial Sequence: Synthetic oligonucleotide
caccgagagccggguccuc

SEQ ID NO: 4194 - RNA, 19 nt, Artificial Sequence
  Description of Artificial Sequence: Synthetic oligonucleotide
ccccggaguaccuggcgcc

SEQ ID NO: 4195 - RNA, 19 nt, Artificial Sequence
  Description of Artificial Sequence: Synthetic oligonucleotide
caccuuugucauacgcugc

SEQ ID NO: 4196 - RNA, 19 nt, Artificial Sequence
  Description of Artificial Sequence: Synthetic oligonucleotide
cacgguacuuccugcugaa

SEQ ID NO: 4197 - RNA, 19 nt, Artificial Sequence
  Description of Artificial Sequence: Synthetic oligonucleotide
cagucaccgagagccgggu

SEQ ID NO: 4198 - RNA, 19 nt, Artificial Sequence
  Description of Artificial Sequence: Synthetic oligonucleotide
caggaccacgagcgccucu

SEQ ID NO: 4199 - RNA, 19 nt, Artificial Sequence
  Description of Artificial Sequence: Synthetic oligonucleotide
ccgccgcugccgcugccgg

SEQ ID NO: 4200 - RNA, 19 nt, Artificial Sequence
  Description of Artificial Sequence: Synthetic oligonucleotide
gcggacccacuucccccag

SEQ ID NO: 4201 - RNA, 19 nt, Artificial Sequence
  Description of Artificial Sequence: Synthetic oligonucleotide
ugucauacgcugccugcag

SEQ ID NO: 4202 - RNA, 19 nt, Artificial Sequence
  Description of Artificial Sequence: Synthetic oligonucleotide
caugaagauccugcggaag

SEQ ID NO: 4203 - RNA, 19 nt, Artificial Sequence
  Description of Artificial Sequence: Synthetic oligonucleotide
ccaacaccuuugucauacg

SEQ ID NO: 4204 - RNA, 19 nt, Artificial Sequence
  Description of Artificial Sequence: Synthetic oligonucleotide
ccacgguacuuccugcuga

SEQ ID NO: 4205 - RNA, 19 nt, Artificial Sequence
  Description of Artificial Sequence: Synthetic oligonucleotide
ccaggaccacgagcgccuc

SEQ ID NO: 4206 - RNA, 19 nt, Artificial Sequence
  Description of Artificial Sequence: Synthetic oligonucleotide
caaucacacccccugaccg

SEQ ID NO: 4207 - RNA, 19 nt, Artificial Sequence
  Description of Artificial Sequence: Synthetic oligonucleotide
ccaugaagauccugcggaa

SEQ ID NO: 4208 - RNA, 19 nt, Artificial Sequence
  Description of Artificial Sequence: Synthetic oligonucleotide
cccaacaccuuugucauac

SEQ ID NO: 4209 - RNA, 19 nt, Artificial Sequence
  Description of Artificial Sequence: Synthetic oligonucleotide
cucacacagucaccgagag

SEQ ID NO: 4210 - RNA, 19 nt, Artificial Sequence
  Description of Artificial Sequence: Synthetic oligonucleotide
ccucaggucacguccgagg

SEQ ID NO: 4211 - RNA, 19 nt, Artificial Sequence
  Description of Artificial Sequence: Synthetic oligonucleotide
cccguuccucacugcgcug

SEQ ID NO: 4212 - RNA, 19 nt, Artificial Sequence
  Description of Artificial Sequence: Synthetic oligonucleotide
ccguuccucacugcgcuga

SEQ ID NO: 4213 - RNA, 19 nt, Artificial Sequence
  Description of Artificial Sequence: Synthetic oligonucleotide
ccgagagccggguccucca

SEQ ID NO: 4214 - RNA, 19 nt, Artificial Sequence
  Description of Artificial Sequence: Synthetic oligonucleotide
cagaggagcgggcccgguu

SEQ ID NO: 4215 - RNA, 19 nt, Artificial Sequence
  Description of Artificial Sequence: Synthetic oligonucleotide
ccgggagcgugucuucaca

SEQ ID NO: 4216 - RNA, 19 nt, Artificial Sequence
  Description of Artificial Sequence: Synthetic oligonucleotide
ccugcggaaggaagucauc

SEQ ID NO: 4217 - RNA, 19 nt, Artificial Sequence
  Description of Artificial Sequence: Synthetic oligonucleotide
ccucacugcgcugaaguau

SEQ ID NO: 4218 - RNA, 19 nt, Artificial Sequence
  Description of Artificial Sequence: Synthetic oligonucleotide
ccagacgagagggaggagu

SEQ ID NO: 4219 - RNA, 19 nt, Artificial Sequence
  Description of Artificial Sequence: Synthetic oligonucleotide
ccggaguaccuggcgccug

SEQ ID NO: 4220 - RNA, 19 nt, Artificial Sequence
  Description of Artificial Sequence: Synthetic oligonucleotide
ccuuugucauacgcugccu

SEQ ID NO: 4221 - RNA, 19 nt, Artificial Sequence
  Description of Artificial Sequence: Synthetic oligonucleotide
cguuccucacugcgcugaa

SEQ ID NO: 4222 - RNA, 19 nt, Artificial Sequence
  Description of Artificial Sequence: Synthetic oligonucleotide
cgagagccggguccuccag

SEQ ID NO: 4223 - RNA, 19 nt, Artificial Sequence
  Description of Artificial Sequence: Synthetic oligonucleotide
cgccaugaagauccugcgg

SEQ ID NO: 4224 - RNA, 19 nt, Artificial Sequence
  Description of Artificial Sequence: Synthetic oligonucleotide
cggguccuccagaacacca

SEQ ID NO: 4225 - RNA, 19 nt, Artificial Sequence
  Description of Artificial Sequence: Synthetic oligonucleotide
cgguacuuccugcugaaga

SEQ ID NO: 4226 - RNA, 19 nt, Artificial Sequence
  Description of Artificial Sequence: Synthetic oligonucleotide
aggccacgguacuuccugc

SEQ ID NO: 4227 - RNA, 19 nt, Artificial Sequence
  Description of Artificial Sequence: Synthetic oligonucleotide
cgggagcgugucuucacag

SEQ ID NO: 4228 - RNA, 19 nt, Artificial Sequence
  Description of Artificial Sequence: Synthetic oligonucleotide
cgggcccgguuuuauggug

SEQ ID NO: 4229 - RNA, 19 nt, Artificial Sequence
  Description of Artificial Sequence: Synthetic oligonucleotide
gguccuccagaacaccagg

SEQ ID NO: 4230 - RNA, 19 nt, Artificial Sequence
  Description of Artificial Sequence: Synthetic oligonucleotide
cgugguccagaagaagcuc

SEQ ID NO: 4231 - RNA, 19 nt, Artificial Sequence
  Description of Artificial Sequence: Synthetic oligonucleotide
cuauggccgggccguggac

SEQ ID NO: 4232 - RNA, 19 nt, Artificial Sequence
  Description of Artificial Sequence: Synthetic oligonucleotide
cuccagacgagagggagga

SEQ ID NO: 4233 - RNA, 19 nt, Artificial Sequence
  Description of Artificial Sequence: Synthetic oligonucleotide
cagacgagagggaggagug

SEQ ID NO: 4234 - RNA, 19 nt, Artificial Sequence
  Description of Artificial Sequence: Synthetic oligonucleotide
cggaguaccuggcgccuga

SEQ ID NO: 4235 - RNA, 19 nt, Artificial Sequence
  Description of Artificial Sequence: Synthetic oligonucleotide
cuuugucauacgcugccug

SEQ ID NO: 4236 - RNA, 19 nt, Artificial Sequence
  Description of Artificial Sequence: Synthetic oligonucleotide
guuccucacugcgcugaag

SEQ ID NO: 4237 - RNA, 19 nt, Artificial Sequence
  Description of Artificial Sequence: Synthetic oligonucleotide
cuugcugggcugcuuaaga

SEQ ID NO: 4238 - RNA, 19 nt, Artificial Sequence
  Description of Artificial Sequence: Synthetic oligonucleotide
gagccggguccuccagaac

SEQ ID NO: 4239 - RNA, 19 nt, Artificial Sequence
  Description of Artificial Sequence: Synthetic oligonucleotide
gaagaagcuccugccaccc

SEQ ID NO: 4240 - RNA, 19 nt, Artificial Sequence
  Description of Artificial Sequence: Synthetic oligonucleotide
gaagauccugcggaaggaa

SEQ ID NO: 4241 - RNA, 19 nt, Artificial Sequence
  Description of Artificial Sequence: Synthetic oligonucleotide
gaagcuccugccacccuuc

SEQ ID NO: 4242 - RNA, 19 nt, Artificial Sequence
  Description of Artificial Sequence: Synthetic oligonucleotide
gcgggagaaggccacuggc

SEQ ID NO: 4243 - RNA, 19 nt, Artificial Sequence
  Description of Artificial Sequence: Synthetic oligonucleotide
gagcgggcccgguuuuaug

SEQ ID NO: 4244 - RNA, 19 nt, Artificial Sequence
  Description of Artificial Sequence: Synthetic oligonucleotide
gaugccaaggaggucaugg

SEQ ID NO: 4245 - RNA, 19 nt, Artificial Sequence
  Description of Artificial Sequence: Synthetic oligonucleotide
gacuauggccgggccgugg

SEQ ID NO: 4246 - RNA, 19 nt, Artificial Sequence
  Description of Artificial Sequence: Synthetic oligonucleotide
gagagccggguccuccaga

SEQ ID NO: 4247 - RNA, 19 nt, Artificial Sequence
  Description of Artificial Sequence: Synthetic oligonucleotide
gagcgugucuucacagagg

SEQ ID NO: 4248 - RNA, 19 nt, Artificial Sequence
  Description of Artificial Sequence: Synthetic oligonucleotide
gaggagcgggcccgguuuu

SEQ ID NO: 4249 - RNA, 19 nt, Artificial Sequence
  Description of Artificial Sequence: Synthetic oligonucleotide
gauccugcggaaggaaguc

SEQ ID NO: 4250 - RNA, 19 nt, Artificial Sequence
  Description of Artificial Sequence: Synthetic oligonucleotide
cauccuggugcgggagaag

SEQ ID NO: 4251 - RNA, 19 nt, Artificial Sequence
  Description of Artificial Sequence: Synthetic oligonucleotide
gaugaagaccgagaggccg

SEQ ID NO: 4252 - RNA, 19 nt, Artificial Sequence
  Description of Artificial Sequence: Synthetic oligonucleotide
ggaccccggaguaccuggc

SEQ ID NO: 4253 - RNA, 19 nt, Artificial Sequence
  Description of Artificial Sequence: Synthetic oligonucleotide
gcacccguuccucacugcg

SEQ ID NO: 4254 - RNA, 19 nt, Artificial Sequence
  Description of Artificial Sequence: Synthetic oligonucleotide
ccagaacaccaggcacccg

SEQ ID NO: 4255 - RNA, 19 nt, Artificial Sequence
  Description of Artificial Sequence: Synthetic oligonucleotide
gccacgguacuuccugcug

SEQ ID NO: 4256 - RNA, 19 nt, Artificial Sequence
  Description of Artificial Sequence: Synthetic oligonucleotide
gccaugaagauccugcgga

SEQ ID NO: 4257 - RNA, 19 nt, Artificial Sequence
  Description of Artificial Sequence: Synthetic oligonucleotide
gaggccacgguacuuccug

SEQ ID NO: 4258 - RNA, 19 nt, Artificial Sequence
  Description of Artificial Sequence: Synthetic oligonucleotide
ggguccuccagaacaccag

SEQ ID NO: 4259 - RNA, 19 nt, Artificial Sequence
  Description of Artificial Sequence: Synthetic oligonucleotide
gcucccccagugacuccuc

SEQ ID NO: 4260 - RNA, 19 nt, Artificial Sequence
  Description of Artificial Sequence: Synthetic oligonucleotide
gcuugcugggcugcuuaag

SEQ ID NO: 4261 - RNA, 19 nt, Artificial Sequence
  Description of Artificial Sequence: Synthetic oligonucleotide
ggaccacagucaucgagag

SEQ ID NO: 4262 - RNA, 19 nt, Artificial Sequence
  Description of Artificial Sequence: Synthetic oligonucleotide
cgaugccaaggaggucaug

SEQ ID NO: 4263 - RNA, 19 nt, Artificial Sequence
  Description of Artificial Sequence: Synthetic oligonucleotide
gggaccccggaguaccugg

SEQ ID NO: 4264 - RNA, 19 nt, Artificial Sequence
  Description of Artificial Sequence: Synthetic oligonucleotide
cgcucacacagucaccgag

SEQ ID NO: 4265 - RNA, 19 nt, Artificial Sequence
  Description of Artificial Sequence: Synthetic oligonucleotide
ggcucccccagugacuccu

SEQ ID NO: 4266 - RNA, 19 nt, Artificial Sequence
  Description of Artificial Sequence: Synthetic oligonucleotide
gggagcgugucuucacaga

SEQ ID NO: 4267 - RNA, 19 nt, Artificial Sequence
  Description of Artificial Sequence: Synthetic oligonucleotide
gggcccgguuuuauggugc

SEQ ID NO: 4268 - RNA, 19 nt, Artificial Sequence
  Description of Artificial Sequence: Synthetic oligonucleotide
gggggugggcaucucuggu

SEQ ID NO: 4269 - RNA, 19 nt, Artificial Sequence
  Description of Artificial Sequence: Synthetic oligonucleotide
ggugcgggagaaggccacu

SEQ ID NO: 4270 - RNA, 19 nt, Artificial Sequence
  Description of Artificial Sequence: Synthetic oligonucleotide
gucaucgagaggaccuucc

SEQ ID NO: 4271 - RNA, 19 nt, Artificial Sequence
  Description of Artificial Sequence: Synthetic oligonucleotide
gugcgggagaaggccacug

SEQ ID NO: 4272 - RNA, 19 nt, Artificial Sequence
  Description of Artificial Sequence: Synthetic oligonucleotide
gucauccuggugcgggaga

SEQ ID NO: 4273 - RNA, 19 nt, Artificial Sequence
  Description of Artificial Sequence: Synthetic oligonucleotide
gucgcucacacagucaccg

SEQ ID NO: 4274 - RNA, 19 nt, Artificial Sequence
  Description of Artificial Sequence: Synthetic oligonucleotide
uauggccgggccguggacu

SEQ ID NO: 4275 - RNA, 19 nt, Artificial Sequence
  Description of Artificial Sequence: Synthetic oligonucleotide
ucagugacggggccaccau

SEQ ID NO: 4276 - RNA, 19 nt, Artificial Sequence
  Description of Artificial Sequence: Synthetic oligonucleotide
gcugggcugcuuaagaagg

SEQ ID NO: 4277 - RNA, 19 nt, Artificial Sequence
  Description of Artificial Sequence: Synthetic oligonucleotide
uugucauacgcugccugca

SEQ ID NO: 4278 - RNA, 19 nt, Artificial Sequence
  Description of Artificial Sequence: Synthetic oligonucleotide
ucaucgagaggaccuucca

SEQ ID NO: 4279 - RNA, 19 nt, Artificial Sequence
  Description of Artificial Sequence: Synthetic oligonucleotide
uccugcggaaggaagucau

SEQ ID NO: 4280 - RNA, 19 nt, Artificial Sequence
  Description of Artificial Sequence: Synthetic oligonucleotide
uccagacgagagggaggag

SEQ ID NO: 4281 - RNA, 19 nt, Artificial Sequence
  Description of Artificial Sequence: Synthetic oligonucleotide
ucacagaggagcgggcccg

SEQ ID NO: 4282 - RNA, 19 nt, Artificial Sequence
  Description of Artificial Sequence: Synthetic oligonucleotide
ugaagaccgagaggccgcg

SEQ ID NO: 4283 - RNA, 19 nt, Artificial Sequence
  Description of Artificial Sequence: Synthetic oligonucleotide
ugaagauccugcggaagga

SEQ ID NO: 4284 - RNA, 19 nt, Artificial Sequence
  Description of Artificial Sequence: Synthetic oligonucleotide
ugcgggagaaggccacugg

SEQ ID NO: 4285 - RNA, 19 nt, Artificial Sequence
  Description of Artificial Sequence: Synthetic oligonucleotide
ugacuauggccgggccgug

SEQ ID NO: 4286 - RNA, 19 nt, Artificial Sequence
  Description of Artificial Sequence: Synthetic oligonucleotide
ggaguaccuggcgccugag

SEQ ID NO: 4287 - RNA, 19 nt, Artificial Sequence
  Description of Artificial Sequence: Synthetic oligonucleotide
ucauccuggugcgggagaa

SEQ ID NO: 4288 - RNA, 19 nt, Artificial Sequence
  Description of Artificial Sequence: Synthetic oligonucleotide
ugcuugcugggcugcuuaa

SEQ ID NO: 4289 - RNA, 19 nt, Artificial Sequence
  Description of Artificial Sequence: Synthetic oligonucleotide
uggaccacagucaucgaga

SEQ ID NO: 4290 - RNA, 19 nt, Artificial Sequence
  Description of Artificial Sequence: Synthetic oligonucleotide
ucgcucacacagucaccga

SEQ ID NO: 4291 - RNA, 19 nt, Artificial Sequence
  Description of Artificial Sequence: Synthetic oligonucleotide
uggguacaaggagaggccc

SEQ ID NO: 4292 - RNA, 19 nt, Artificial Sequence
  Description of Artificial Sequence: Synthetic oligonucleotide
ggugggggugggcaucucu

SEQ ID NO: 4293 - RNA, 19 nt, Artificial Sequence
  Description of Artificial Sequence: Synthetic oligonucleotide
uuugucauacgcugccugc

SEQ ID NO: 4294 - RNA, 19 nt, Artificial Sequence
  Description of Artificial Sequence: Synthetic oligonucleotide
uucacagaggagcgggccc

SEQ ID NO: 4295 - RNA, 19 nt, Artificial Sequence
  Description of Artificial Sequence: Synthetic oligonucleotide
uugcugggcugcuuaagaa

SEQ ID NO: 4296 - RNA, 19 nt, Artificial Sequence
  Description of Artificial Sequence: Synthetic oligonucleotide
auucuccagacgagaggga

SEQ ID NO: 4297 - RNA, 19 nt, Artificial Sequence
  Description of Artificial Sequence: Synthetic oligonucleotide
caaggaugaagucgcucac

SEQ ID NO: 4298 - RNA, 19 nt, Artificial Sequence
  Description of Artificial Sequence: Synthetic oligonucleotide
ccaaggaugaagucgcuca

SEQ ID NO: 4299 - RNA, 19 nt, Artificial Sequence
  Description of Artificial Sequence: Synthetic oligonucleotide
cccgguuuuauggugcaga

SEQ ID NO: 4300 - RNA, 19 nt, Artificial Sequence
  Description of Artificial Sequence: Synthetic oligonucleotide
cgguuuuauggugcagaga

SEQ ID NO: 4301 - RNA, 19 nt, Artificial Sequence
  Description of Artificial Sequence: Synthetic oligonucleotide
gauucuccagacgagaggg

SEQ ID NO: 4302 - RNA, 19 nt, Artificial Sequence
  Description of Artificial Sequence: Synthetic oligonucleotide
gccaaggaugaagucgcuc

SEQ ID NO: 4303 - RNA, 19 nt, Artificial Sequence
  Description of Artificial Sequence: Synthetic oligonucleotide
ggaugaagucgcucacaca

SEQ ID NO: 4304 - RNA, 19 nt, Artificial Sequence
  Description of Artificial Sequence: Synthetic oligonucleotide
gguuuuauggugcagagau

SEQ ID NO: 4305 - RNA, 19 nt, Artificial Sequence
  Description of Artificial Sequence: Synthetic oligonucleotide
guuuuauggugcagagauu

SEQ ID NO: 4306 - RNA, 19 nt, Artificial Sequence
  Description of Artificial Sequence: Synthetic oligonucleotide
ugcagagauugucucggcu

SEQ ID NO: 4307 - RNA, 19 nt, Artificial Sequence
  Description of Artificial Sequence: Synthetic oligonucleotide
aaguuggagaaucuaaugc

SEQ ID NO: 4308 - RNA, 19 nt, Artificial Sequence
  Description of Artificial Sequence: Synthetic oligonucleotide
acaccaccugaaaaauaug

SEQ ID NO: 4309 - RNA, 19 nt, Artificial Sequence
  Description of Artificial Sequence: Synthetic oligonucleotide
accgugaucucaaguugga

SEQ ID NO: 4310 - RNA, 19 nt, Artificial Sequence
  Description of Artificial Sequence: Synthetic oligonucleotide
aucucaaguuggagaaucu

SEQ ID NO: 4311 - RNA, 19 nt, Artificial Sequence
  Description of Artificial Sequence: Synthetic oligonucleotide
acuaugcuaugaagauucu

SEQ ID NO: 4312 - RNA, 19 nt, Artificial Sequence
  Description of Artificial Sequence: Synthetic oligonucleotide
aguuggagaaucuaaugcu

SEQ ID NO: 4313 - RNA, 19 nt, Artificial Sequence
  Description of Artificial Sequence: Synthetic oligonucleotide
agcuguuuuuccauuuguc

SEQ ID NO: 4314 - RNA, 19 nt, Artificial Sequence
  Description of Artificial Sequence: Synthetic oligonucleotide
aguggacuacuguuauaga

SEQ ID NO: 4315 - RNA, 19 nt, Artificial Sequence
  Description of Artificial Sequence: Synthetic oligonucleotide
auuacaauaacaccaccug

SEQ ID NO: 4316 - RNA, 19 nt, Artificial Sequence
  Description of Artificial Sequence: Synthetic oligonucleotide
auugucucugccuuggacu

SEQ ID NO: 4317 - RNA, 19 nt, Artificial Sequence
  Description of Artificial Sequence: Synthetic oligonucleotide
uaaugggggcgagcuguuu

SEQ ID NO: 4318 - RNA, 19 nt, Artificial Sequence
  Description of Artificial Sequence: Synthetic oligonucleotide
caaguuggagaaucuaaug

SEQ ID NO: 4319 - RNA, 19 nt, Artificial Sequence
  Description of Artificial Sequence: Synthetic oligonucleotide
caccaccugaaaaauauga

SEQ ID NO: 4320 - RNA, 19 nt, Artificial Sequence
  Description of Artificial Sequence: Synthetic oligonucleotide
caguggacuacuguuauag

SEQ ID NO: 4321 - RNA, 19 nt, Artificial Sequence
  Description of Artificial Sequence: Synthetic oligonucleotide
uuaaugggggcgagcuguu

SEQ ID NO: 4322 - RNA, 19 nt, Artificial Sequence
  Description of Artificial Sequence: Synthetic oligonucleotide
cuaugaagauucugaagaa

SEQ ID NO: 4323 - RNA, 19 nt, Artificial Sequence
  Description of Artificial Sequence: Synthetic oligonucleotide
ccgugaucucaaguuggag

SEQ ID NO: 4324 - RNA, 19 nt, Artificial Sequence
  Description of Artificial Sequence: Synthetic oligonucleotide
cauugcuuucagggcucuu

SEQ ID NO: 4325 - RNA, 19 nt, Artificial Sequence
  Description of Artificial Sequence: Synthetic oligonucleotide
cgagcuguuuuuccauuug

SEQ ID NO: 4326 - RNA, 19 nt, Artificial Sequence
  Description of Artificial Sequence: Synthetic oligonucleotide
cgugaucucaaguuggaga

SEQ ID NO: 4327 - RNA, 19 nt, Artificial Sequence
  Description of Artificial Sequence: Synthetic oligonucleotide
cucaaguuggagaaucuaa

SEQ ID NO: 4328 - RNA, 19 nt, Artificial Sequence
  Description of Artificial Sequence: Synthetic oligonucleotide
cuccaguggacuacuguua

SEQ ID NO: 4329 - RNA, 19 nt, Artificial Sequence
  Description of Artificial Sequence: Synthetic oligonucleotide
gaucucaaguuggagaauc

SEQ ID NO: 4330 - RNA, 19 nt, Artificial Sequence
  Description of Artificial Sequence: Synthetic oligonucleotide
gcaaguggacgagaauaag

SEQ ID NO: 4331 - RNA, 19 nt, Artificial Sequence
  Description of Artificial Sequence: Synthetic oligonucleotide
guuaaugggggcgagcugu

SEQ ID NO: 4332 - RNA, 19 nt, Artificial Sequence
  Description of Artificial Sequence: Synthetic oligonucleotide
gcuaugaagauucugaaga

SEQ ID NO: 4333 - RNA, 19 nt, Artificial Sequence
  Description of Artificial Sequence: Synthetic oligonucleotide
gucuccaguggacuacugu

SEQ ID NO: 4334 - RNA, 19 nt, Artificial Sequence
  Description of Artificial Sequence: Synthetic oligonucleotide
gcgagcuguuuuuccauuu

SEQ ID NO: 4335 - RNA, 19 nt, Artificial Sequence
  Description of Artificial Sequence: Synthetic oligonucleotide
uauccccucaacaacuuuu

SEQ ID NO: 4336 - RNA, 19 nt, Artificial Sequence
  Description of Artificial Sequence: Synthetic oligonucleotide
guuggagaaucuaaugcug

SEQ ID NO: 4337 - RNA, 19 nt, Artificial Sequence
  Description of Artificial Sequence: Synthetic oligonucleotide
ggcgagcuguuuuuccauu

SEQ ID NO: 4338 - RNA, 19 nt, Artificial Sequence
  Description of Artificial Sequence: Synthetic oligonucleotide
gugaucucaaguuggagaa

SEQ ID NO: 4339 - RNA, 19 nt, Artificial Sequence
  Description of Artificial Sequence: Synthetic oligonucleotide
uguguaccgugaucucaag

SEQ ID NO: 4340 - RNA, 19 nt, Artificial Sequence
  Description of Artificial Sequence: Synthetic oligonucleotide
guaccgugaucucaaguug

SEQ ID NO: 4341 - RNA, 19 nt, Artificial Sequence
  Description of Artificial Sequence: Synthetic oligonucleotide
cagccaccaugaagacauu

SEQ ID NO: 4342 - RNA, 19 nt, Artificial Sequence
  Description of Artificial Sequence: Synthetic oligonucleotide
uaccgugaucucaaguugg

SEQ ID NO: 4343 - RNA, 19 nt, Artificial Sequence
  Description of Artificial Sequence: Synthetic oligonucleotide
uacuaugcuaugaagauuc

SEQ ID NO: 4344 - RNA, 19 nt, Artificial Sequence
  Description of Artificial Sequence: Synthetic oligonucleotide
ucaaguuggagaaucuaau

SEQ ID NO: 4345 - RNA, 19 nt, Artificial Sequence
  Description of Artificial Sequence: Synthetic oligonucleotide
uuacaauaacaccaccuga

SEQ ID NO: 4346 - RNA, 19 nt, Artificial Sequence
  Description of Artificial Sequence: Synthetic oligonucleotide
ucauugcuuucagggcucu

SEQ ID NO: 4347 - RNA, 19 nt, Artificial Sequence
  Description of Artificial Sequence: Synthetic oligonucleotide
uccaguggacuacuguuau

SEQ ID NO: 4348 - RNA, 19 nt, Artificial Sequence
  Description of Artificial Sequence: Synthetic oligonucleotide
uuguguaccgugaucucaa

SEQ ID NO: 4349 - RNA, 19 nt, Artificial Sequence
  Description of Artificial Sequence: Synthetic oligonucleotide
uguaccgugaucucaaguu

SEQ ID NO: 4350 - RNA, 19 nt, Artificial Sequence
  Description of Artificial Sequence: Synthetic oligonucleotide
gguguucucugaggaccgc

SEQ ID NO: 4351 - RNA, 19 nt, Artificial Sequence
  Description of Artificial Sequence: Synthetic oligonucleotide
uugucucugccuuggacua

SEQ ID NO: 4352 - RNA, 19 nt, Artificial Sequence
  Description of Artificial Sequence: Synthetic oligonucleotide
acaaugaaugauuuugacu

SEQ ID NO: 4353 - RNA, 19 nt, Artificial Sequence
  Description of Artificial Sequence: Synthetic oligonucleotide
accguuuguguuuugugau

SEQ ID NO: 4354 - RNA, 19 nt, Artificial Sequence
  Description of Artificial Sequence: Synthetic oligonucleotide
auuuuggacuuugcaaaga

SEQ ID NO: 4355 - RNA, 19 nt, Artificial Sequence
  Description of Artificial Sequence: Synthetic oligonucleotide
augaaugauuuugacuauu

SEQ ID NO: 4356 - RNA, 19 nt, Artificial Sequence
  Description of Artificial Sequence: Synthetic oligonucleotide
augaagaauuuacagcuca

SEQ ID NO: 4357 - RNA, 19 nt, Artificial Sequence
  Description of Artificial Sequence: Synthetic oligonucleotide
aaaggaugaaguggcacac

SEQ ID NO: 4358 - RNA, 19 nt, Artificial Sequence
  Description of Artificial Sequence: Synthetic oligonucleotide
aaugaaugauuuugacuau

SEQ ID NO: 4359 - RNA, 19 nt, Artificial Sequence
  Description of Artificial Sequence: Synthetic oligonucleotide
uauugcaaaggaugaagug

SEQ ID NO: 4360 - RNA, 19 nt, Artificial Sequence
  Description of Artificial Sequence: Synthetic oligonucleotide
caaaggaugaaguggcaca

SEQ ID NO: 4361 - RNA, 19 nt, Artificial Sequence
  Description of Artificial Sequence: Synthetic oligonucleotide
caaugaaugauuuugacua

SEQ ID NO: 4362 - RNA, 19 nt, Artificial Sequence
  Description of Artificial Sequence: Synthetic oligonucleotide
ccguuuguguuuugugaug

SEQ ID NO: 4363 - RNA, 19 nt, Artificial Sequence
  Description of Artificial Sequence: Synthetic oligonucleotide
ccuuccagacaaaagaccg

SEQ ID NO: 4364 - RNA, 19 nt, Artificial Sequence
  Description of Artificial Sequence: Synthetic oligonucleotide
cuaugcuaugaagauucug

SEQ ID NO: 4365 - RNA, 19 nt, Artificial Sequence
  Description of Artificial Sequence: Synthetic oligonucleotide
gacaaugaaugauuuugac

SEQ ID NO: 4366 - RNA, 19 nt, Artificial Sequence
  Description of Artificial Sequence: Synthetic oligonucleotide
gaccguuuguguuuuguga

SEQ ID NO: 4367 - RNA, 19 nt, Artificial Sequence
  Description of Artificial Sequence: Synthetic oligonucleotide
gauuuuggacuuugcaaag

SEQ ID NO: 4368 - RNA, 19 nt, Artificial Sequence
  Description of Artificial Sequence: Synthetic oligonucleotide
gcaaaggaugaaguggcac

SEQ ID NO: 4369 - RNA, 19 nt, Artificial Sequence
  Description of Artificial Sequence: Synthetic oligonucleotide
guuuguguuuugugaugga

SEQ ID NO: 4370 - RNA, 19 nt, Artificial Sequence
  Description of Artificial Sequence: Synthetic oligonucleotide
ggaugaaguggcacacacu

SEQ ID NO: 4371 - RNA, 19 nt, Artificial Sequence
  Description of Artificial Sequence: Synthetic oligonucleotide
uugaugaagaauuuacagc

SEQ ID NO: 4372 - RNA, 19 nt, Artificial Sequence
  Description of Artificial Sequence: Synthetic oligonucleotide
ugaaugauuuugacuauuu

SEQ ID NO: 4373 - RNA, 19 nt, Artificial Sequence
  Description of Artificial Sequence: Synthetic oligonucleotide
ugaagaauuuacagcucag

SEQ ID NO: 4374 - RNA, 19 nt, Artificial Sequence
  Description of Artificial Sequence: Synthetic oligonucleotide
ugcaaaggaugaaguggca

SEQ ID NO: 4375 - RNA, 19 nt, Artificial Sequence
  Description of Artificial Sequence: Synthetic oligonucleotide
uuugaugaagaauuuacag

SEQ ID NO: 4376 - RNA, 19 nt, Artificial Sequence
  Description of Artificial Sequence: Synthetic oligonucleotide
gcuuuuugagcucauccuc

SEQ ID NO: 4377 - RNA, 19 nt, Artificial Sequence
  Description of Artificial Sequence: Synthetic oligonucleotide
cuccagaauaucuggcacc

SEQ ID NO: 4378 - RNA, 19 nt, Artificial Sequence
  Description of Artificial Sequence: Synthetic oligonucleotide
agugacggggccaccauga

SEQ ID NO: 4379 - RNA, 19 nt, Artificial Sequence
  Description of Artificial Sequence: Synthetic oligonucleotide
gugacggggccaccaugaa

SEQ ID NO: 4380 - RNA, 19 nt, Artificial Sequence
  Description of Artificial Sequence: Synthetic oligonucleotide
gucaccgagagccgggucc

SEQ ID NO: 4381 - RNA, 19 nt, Artificial Sequence
  Description of Artificial Sequence: Synthetic oligonucleotide
augcagccaccaugaagac

SEQ ID NO: 4382 - RNA, 19 nt, Artificial Sequence
  Description of Artificial Sequence: Synthetic oligonucleotide
gaugcagccaccaugaaga

SEQ ID NO: 4383 - RNA, 19 nt, Artificial Sequence
  Description of Artificial Sequence: Synthetic oligonucleotide
agacgcugccgcugccgcu

SEQ ID NO: 4384 - RNA, 19 nt, Artificial Sequence
  Description of Artificial Sequence: Synthetic oligonucleotide
gagcggccccggcccaaca

SEQ ID NO: 4385 - RNA, 19 nt, Artificial Sequence
  Description of Artificial Sequence: Synthetic oligonucleotide
uuucaaaaaaaaaaaaaaa

SEQ ID NO: 4386 - RNA, 19 nt, Artificial Sequence
  Description of Artificial Sequence: Synthetic oligonucleotide
uacaaggagaggcccgagg

SEQ ID NO: 4387 - RNA, 19 nt, Artificial Sequence
  Description of Artificial Sequence: Synthetic oligonucleotide
gcagccaccaugaagacau

SEQ ID NO: 4388 - RNA, 19 nt, Artificial Sequence
  Description of Artificial Sequence: Synthetic oligonucleotide
acaccugaguaccuggccc

SEQ ID NO: 4389 - RNA, 19 nt, Artificial Sequence
  Description of Artificial Sequence: Synthetic oligonucleotide
agaagaagcucagcccacc

SEQ ID NO: 4390 - RNA, 19 nt, Artificial Sequence
  Description of Artificial Sequence: Synthetic oligonucleotide
caccugaguaccuggcccc

SEQ ID NO: 4391 - RNA, 19 nt, Artificial Sequence
  Description of Artificial Sequence: Synthetic oligonucleotide
gaagaagcucagcccaccc

SEQ ID NO: 4392 - RNA, 19 nt, Artificial Sequence
  Description of Artificial Sequence: Synthetic oligonucleotide
gcacaccugaguaccuggc

SEQ ID NO: 4393 - RNA, 19 nt, Artificial Sequence
  Description of Artificial Sequence: Synthetic oligonucleotide
ggcacaccugaguaccugg
